United States Patent Application Publication US 2013/0017253 A1 - sequence listing, part 2

SEQ ID NO: 29551 - protein, 9 aa, Artificial Sequence
  Peptide Derived from Human Papillomavirus
ILPSHTPMW

SEQ ID NO: 29552 - protein, 9 aa, Artificial Sequence
  Peptide Derived from Human Papillomavirus
ILQWSSLGI

SEQ ID NO: 29553 - protein, 10 aa, Artificial Sequence
  Peptide Derived from Human Papillomavirus
ILQWSSLGIF

SEQ ID NO: 29554 - protein, 11 aa, Artificial Sequence
  Peptide Derived from Human Papillomavirus
ILQWSSLGIFL

SEQ ID NO: 29555 - protein, 9 aa, Artificial Sequence
  Peptide Derived from Human Papillomavirus
IPYFFADGF

SEQ ID NO: 29556 - protein, 10 aa, Artificial Sequence
  Peptide Derived from Human Papillomavirus
IPYFFADGFV

SEQ ID NO: 29557 - protein, 11 aa, Artificial Sequence
  Peptide Derived from Human Papillomavirus
IPYFFADGFVA

SEQ ID NO: 29558 - protein, 10 aa, Artificial Sequence
  Peptide Derived from Human Papillomavirus
IVTLVEDSSV

SEQ ID NO: 29559 - protein, 11 aa, Artificial Sequence
  Peptide Derived from Human Papillomavirus
IVTLVEDSSVV

SEQ ID NO: 29560 - protein, 8 aa, Artificial Sequence
  Peptide Derived from Human Papillomavirus
KILQWSSL

SEQ ID NO: 29561 - protein, 10 aa, Artificial Sequence
  Peptide Derived from Human Papillomavirus
KILQWSSLGI

SEQ ID NO: 29562 - protein, 11 aa, Artificial Sequence
  Peptide Derived from Human Papillomavirus
KILQWSSLGIF

SEQ ID NO: 29563 - protein, 9 aa, Artificial Sequence
  Peptide Derived from Human Papillomavirus
KQIGGRVHF

SEQ ID NO: 29564 - protein, 10 aa, Artificial Sequence
  Peptide Derived from Human Papillomavirus
KQIGGRVHFY

SEQ ID NO: 29565 - protein, 10 aa, Artificial Sequence
  Peptide Derived from Human Papillomavirus
KQSGTCPPDV

SEQ ID NO: 29566 - protein, 11 aa, Artificial Sequence
  Peptide Derived from Human Papillomavirus
KQSGTCPPDVI

SEQ ID NO: 29567 - protein, 8 aa, Artificial Sequence
  Peptide Derived from Human Papillomavirus
KVEGTTLA

SEQ ID NO: 29568 - protein, 11 aa, Artificial Sequence
  Peptide Derived from Human Papillomavirus
KVEGTTLADKI

SEQ ID NO: 29569 - protein, 10 aa, Artificial Sequence
  Peptide Derived from Human Papillomavirus
LISATNDSDL

SEQ ID NO: 29570 - protein, 11 aa, Artificial Sequence
  Peptide Derived from Human Papillomavirus
LISATNDSDLF

SEQ ID NO: 29571 - protein, 8 aa, Artificial Sequence
  Peptide Derived from Human Papillomavirus
LPSHTPMW

SEQ ID NO: 29572 - protein, 8 aa, Artificial Sequence
  Peptide Derived from Human Papillomavirus
LQWSSLGI

SEQ ID NO: 29573 - protein, 9 aa, Artificial Sequence
  Peptide Derived from Human Papillomavirus
LQWSSLGIF

SEQ ID NO: 29574 - protein, 10 aa, Artificial Sequence
  Peptide Derived from Human Papillomavirus
LQWSSLGIFL

SEQ ID NO: 29575 - protein, 8 aa, Artificial Sequence
  Peptide Derived from Human Papillomavirus
LVEDSSVV

SEQ ID NO: 29576 - protein, 9 aa, Artificial Sequence
  Peptide Derived from Human Papillomavirus
LVEDSSVVA

SEQ ID NO: 29577 - protein, 8 aa, Artificial Sequence
  Peptide Derived from Human Papillomavirus
LVTFDNPA

SEQ ID NO: 29578 - protein, 9 aa, Artificial Sequence
  Peptide Derived from Human Papillomavirus
LVTFDNPAY

SEQ ID NO: 29579 - protein, 9 aa, Artificial Sequence
  Peptide Derived from Human Papillomavirus
MPSTAASSY

SEQ ID NO: 29580 - protein, 9 aa, Artificial Sequence
  Peptide Derived from Human Papillomavirus
NPAFSDPSI

SEQ ID NO: 29581 - protein, 10 aa, Artificial Sequence
  Peptide Derived from Human Papillomavirus
NPAFSDPSII

SEQ ID NO: 29582 - protein, 11 aa, Artificial Sequence
  Peptide Derived from Human Papillomavirus
NPAYEPLDTTL

SEQ ID NO: 29583 - protein, 11 aa, Artificial Sequence
  Peptide Derived from Human Papillomavirus
NQQVRVSTSQF

SEQ ID NO: 29584 - protein, 8 aa, Artificial Sequence
  Peptide Derived from Human Papillomavirus
NVPDSDFM

SEQ ID NO: 29585 - protein, 10 aa, Artificial Sequence
  Peptide Derived from Human Papillomavirus
NVPDSDFMDI

SEQ ID NO: 29586 - protein, 11 aa, Artificial Sequence
  Peptide Derived from Human Papillomavirus
NVPDSDFMDII

SEQ ID NO: 29587 - protein, 9 aa, Artificial Sequence
  Peptide Derived from Human Papillomavirus
NVTVPLTSA

SEQ ID NO: 29588 - protein, 10 aa, Artificial Sequence
  Peptide Derived from Human Papillomavirus
NVTVPLTSAW

SEQ ID NO: 29589 - protein, 8 aa, Artificial Sequence
  Peptide Derived from Human Papillomavirus
PIAATEEI

SEQ ID NO: 29590 - protein, 10 aa, Artificial Sequence
  Peptide Derived from Human Papillomavirus
PIAATEEIEL

SEQ ID NO: 29591 - protein, 10 aa, Artificial Sequence
  Peptide Derived from Human Papillomavirus
PISSTPLPTV

SEQ ID NO: 29592 - protein, 8 aa, Artificial Sequence
  Peptide Derived from Human Papillomavirus
PIYTGPDI

SEQ ID NO: 29593 - protein, 9 aa, Artificial Sequence
  Peptide Derived from Human Papillomavirus
PIYTGPDII

SEQ ID NO: 29594 - protein, 10 aa, Artificial Sequence
  Peptide Derived from Human Papillomavirus
PIYTGPDIIL

SEQ ID NO: 29595 - protein, 8 aa, Artificial Sequence
  Peptide Derived from Human Papillomavirus
PLDTTLSF

SEQ ID NO: 29596 - protein, 9 aa, Artificial Sequence
  Peptide Derived from Human Papillomavirus
PLGGRSNTV

SEQ ID NO: 29597 - protein, 10 aa, Artificial Sequence
  Peptide Derived from Human Papillomavirus
PLGGRSNTVV

SEQ ID NO: 29598 - protein, 11 aa, Artificial Sequence
  Peptide Derived from Human Papillomavirus
PLISATNDSDL

SEQ ID NO: 29599 - protein, 8 aa, Artificial Sequence
  Peptide Derived from Human Papillomavirus
PLPTVRRV

SEQ ID NO: 29600 - protein, 8 aa, Artificial Sequence
  Peptide Derived from Human Papillomavirus
PLTSAWDV

SEQ ID NO: 29601 - protein, 10 aa, Artificial Sequence
  Peptide Derived from Human Papillomavirus
PLTSAWDVPI

SEQ ID NO: 29602 - protein, 11 aa, Artificial Sequence
  Peptide Derived from Human Papillomavirus
PLTSAWDVPIY

SEQ ID NO: 29603 - protein, 11 aa, Artificial Sequence
  Peptide Derived from Human Papillomavirus
PMWPSTSPTNA

SEQ ID NO: 29604 - protein, 10 aa, Artificial Sequence
  Peptide Derived from Human Papillomavirus
PPASTTPSTI

SEQ ID NO: 29605 - protein, 8 aa, Artificial Sequence
  Peptide Derived from Human Papillomavirus
PPDVINKV

SEQ ID NO: 29606 - protein, 11 aa, Artificial Sequence
  Peptide Derived from Human Papillomavirus
PPPASTTPSTI

SEQ ID NO: 29607 - protein, 8 aa, Artificial Sequence
  Peptide Derived from Human Papillomavirus
PPVVIEPV

SEQ ID NO: 29608 - protein, 10 aa, Artificial Sequence
  Peptide Derived from Human Papillomavirus
PQTGEVSGNI

SEQ ID NO: 29609 - protein, 11 aa, Artificial Sequence
  Peptide Derived from Human Papillomavirus
PQTGEVSGNIF

SEQ ID NO: 29610 - protein, 9 aa, Artificial Sequence
  Peptide Derived from Human Papillomavirus
PVGPTDPSI

SEQ ID NO: 29611 - protein, 10 aa, Artificial Sequence
  Peptide Derived from Human Papillomavirus
PVGPTDPSIV

SEQ ID NO: 29612 - protein, 11 aa, Artificial Sequence
  Peptide Derived from Human Papillomavirus
PVPTFTGTSGF

SEQ ID NO: 29613 - protein, 8 aa, Artificial Sequence
  Peptide Derived from Human Papillomavirus
QIGGRVHF

SEQ ID NO: 29614 - protein, 9 aa, Artificial Sequence
  Peptide Derived from Human Papillomavirus
QIGGRVHFY

SEQ ID NO: 29615 - protein, 10 aa, Artificial Sequence
  Peptide Derived from Human Papillomavirus
QQVRVSTSQF

SEQ ID NO: 29616 - protein, 11 aa, Artificial Sequence
  Peptide Derived from Human Papillomavirus
QQVRVSTSQFL

SEQ ID NO: 29617 - protein, 9 aa, Artificial Sequence
  Peptide Derived from Human Papillomavirus
QVRVSTSQF

SEQ ID NO: 29618 - protein, 10 aa, Artificial Sequence
  Peptide Derived from Human Papillomavirus
QVRVSTSQFL

SEQ ID NO: 29619 - protein, 10 aa, Artificial Sequence
  Peptide Derived from Human Papillomavirus
RIPYFFADGF

SEQ ID NO: 29620 - protein, 11 aa, Artificial Sequence
  Peptide Derived from Human Papillomavirus
RIPYFFADGFV

SEQ ID NO: 29621 - protein, 8 aa, Artificial Sequence
  Peptide Derived from Human Papillomavirus
RLGQRATM

SEQ ID NO: 29622 - protein, 9 aa, Artificial Sequence
  Peptide Derived from Human Papillomavirus
RLGQRATMF

SEQ ID NO: 29623 - protein, 10 aa, Artificial Sequence
  Peptide Derived from Human Papillomavirus
RLYSRANQQV

SEQ ID NO: 29624 - protein, 11 aa, Artificial Sequence
  Peptide Derived from Human Papillomavirus
RPALSSRRGTV

SEQ ID NO: 29625 - protein, 9 aa, Artificial Sequence
  Peptide Derived from Human Papillomavirus
RPPVVIEPV

SEQ ID NO: 29626 - protein, 8 aa, Artificial Sequence
  Peptide Derived from Human Papillomavirus
RVHFYHDI

SEQ ID NO: 29627 - protein, 11 aa, Artificial Sequence
  Peptide Derived from Human Papillomavirus
RVHFYHDISPI

SEQ ID NO: 29628 - protein, 8 aa, Artificial Sequence
  Peptide Derived from Human Papillomavirus
RVRGPRLY

SEQ ID NO: 29629 - protein, 11 aa, Artificial Sequence
  Peptide Derived from Human Papillomavirus
RVRGPRLYSRA

SEQ ID NO: 29630 - protein, 8 aa, Artificial Sequence
  Peptide Derived from Human Papillomavirus
RVSTSQFL

SEQ ID NO: 29631 - protein, 11 aa, Artificial Sequence
  Peptide Derived from Human Papillomavirus
SIIEVPQTGEV

SEQ ID NO: 29632 - protein, 11 aa, Artificial Sequence
  Peptide Derived from Human Papillomavirus
SISSTSFTNPA

SEQ ID NO: 29633 - protein, 11 aa, Artificial Sequence
  Peptide Derived from Human Papillomavirus
SIVTLVEDSSV

SEQ ID NO: 29634 - protein, 9 aa, Artificial Sequence
  Peptide Derived from Human Papillomavirus
SLGIFLGGL

SEQ ID NO: 29635 - protein, 11 aa, Artificial Sequence
  Peptide Derived from Human Papillomavirus
SLGIFLGGLGI

SEQ ID NO: 29636 - protein, 8 aa, Artificial Sequence
  Peptide Derived from Human Papillomavirus
SLTMPSTA

SEQ ID NO: 29637 - protein, 9 aa, Artificial Sequence
  Peptide Derived from Human Papillomavirus
SLTMPSTAA

SEQ ID NO: 29638 - protein, 9 aa, Artificial Sequence
  Peptide Derived from Human Papillomavirus
SLVTFDNPA

SEQ ID NO: 29639 - protein, 10 aa, Artificial Sequence
  Peptide Derived from Human Papillomavirus
SLVTFDNPAY

SEQ ID NO: 29640 - protein, 9 aa, Artificial Sequence
  Peptide Derived from Human Papillomavirus
SPIAATEEI

SEQ ID NO: 29641 - protein, 11 aa, Artificial Sequence
  Peptide Derived from Human Papillomavirus
SPIAATEEIEL

SEQ ID NO: 29642 - protein, 10 aa, Artificial Sequence
  Peptide Derived from Human Papillomavirus
SPTNASTTTY

SEQ ID NO: 29643 - protein, 11 aa, Artificial Sequence
  Peptide Derived from Human Papillomavirus
SPTNASTTTYI

SEQ ID NO: 29644 - protein, 10 aa, Artificial Sequence
  Peptide Derived from Human Papillomavirus
SQFLTHPSSL

SEQ ID NO: 29645 - protein, 11 aa, Artificial Sequence
  Peptide Derived from Human Papillomavirus
SQFLTHPSSLV

SEQ ID NO: 29646 - protein, 9 aa, Artificial Sequence
  Peptide Derived from Human Papillomavirus
SVSISSTSF

SEQ ID NO: 29647 - protein, 9 aa, Artificial Sequence
  Peptide Derived from Human Papillomavirus
SVVASGAPV

SEQ ID NO: 29648 - protein, 8 aa, Artificial Sequence
  Peptide Derived from Human Papillomavirus
TIHKSFTY

SEQ ID NO: 29649 - protein, 11 aa, Artificial Sequence
  Peptide Derived from Human Papillomavirus
TIHKSFTYPKY

SEQ ID NO: 29650 - protein, 9 aa, Artificial Sequence
  Peptide Derived from Human Papillomavirus
TLADKILQW

SEQ ID NO: 29651 - protein, 10 aa, Artificial Sequence
  Peptide Derived from Human Papillomavirus
TLSFEPTSNV

SEQ ID NO: 29652 - protein, 8 aa, Artificial Sequence
  Peptide Derived from Human Papillomavirus
TLVEDSSV

SEQ ID NO: 29653 - protein, 9 aa, Artificial Sequence
  Peptide Derived from Human Papillomavirus
TLVEDSSVV

SEQ ID NO: 29654 - protein, 10 aa, Artificial Sequence
  Peptide Derived from Human Papillomavirus
TLVEDSSVVA

SEQ ID NO: 29655 - protein, 10 aa, Artificial Sequence
  Peptide Derived from Human Papillomavirus
TMFTRSGKQI

SEQ ID NO: 29656 - protein, 10 aa, Artificial Sequence
  Peptide Derived from Human Papillomavirus
TMPSTAASSY

SEQ ID NO: 29657 - protein, 11 aa, Artificial Sequence
  Peptide Derived from Human Papillomavirus
TPAVLDITPTV

SEQ ID NO: 29658 - protein, 9 aa, Artificial Sequence
  Peptide Derived from Human Papillomavirus
TPLPTVRRV

SEQ ID NO: 29659 - protein, 9 aa, Artificial Sequence
  Peptide Derived from Human Papillomavirus
TPSTIHKSF

SEQ ID NO: 29660 - protein, 11 aa, Artificial Sequence
  Peptide Derived from Human Papillomavirus
TPSTIHKSFTY

SEQ ID NO: 29661 - protein, 9 aa, Artificial Sequence
  Peptide Derived from Human Papillomavirus
TPTSGSHGY

SEQ ID NO: 29662 - protein, 9 aa, Artificial Sequence
  Peptide Derived from Human Papillomavirus
TPTVDSVSI

SEQ ID NO: 29663 - protein, 8 aa, Artificial Sequence
  Peptide Derived from Human Papillomavirus
TQYYLWPW

SEQ ID NO: 29664 - protein, 9 aa, Artificial Sequence
  Peptide Derived from Human Papillomavirus
TQYYLWPWY

SEQ ID NO: 29665 - protein, 10 aa, Artificial Sequence
  Peptide Derived from Human Papillomavirus
TQYYLWPWYY

SEQ ID NO: 29666 - protein, 11 aa, Artificial Sequence
  Peptide Derived from Human Papillomavirus
TQYYLWPWYYY

SEQ ID NO: 29667 - protein, 8 aa, Artificial Sequence
  Peptide Derived from Human Papillomavirus
TVPLTSAW

SEQ ID NO: 29668 - protein, 10 aa, Artificial Sequence
  Peptide Derived from Human Papillomavirus
TVPLTSAWDV

SEQ ID NO: 29669 - protein, 11 aa, Artificial Sequence
  Peptide Derived from Human Papillomavirus
TVRFSRLGQRA

SEQ ID NO: 29670 - protein, 10 aa, Artificial Sequence
  Peptide Derived from Human Papillomavirus
TVRRVRGPRL

SEQ ID NO: 29671 - protein, 11 aa, Artificial Sequence
  Peptide Derived from Human Papillomavirus
TVRRVRGPRLY

SEQ ID NO: 29672 - protein, 10 aa, Artificial Sequence
  Peptide Derived from Human Papillomavirus
VINKVEGTTL

SEQ ID NO: 29673 - protein, 11 aa, Artificial Sequence
  Peptide Derived from Human Papillomavirus
VINKVEGTTLA

SEQ ID NO: 29674 - protein, 8 aa, Artificial Sequence
  Peptide Derived from Human Papillomavirus
VLDITPTV

SEQ ID NO: 29675 - protein, 11 aa, Artificial Sequence
  Peptide Derived from Human Papillomavirus
VLDITPTVDSV

SEQ ID NO: 29676 - protein, 9 aa, Artificial Sequence
  Peptide Derived from Human Papillomavirus
VPDSDFMDI

SEQ ID NO: 29677 - protein, 10 aa, Artificial Sequence
  Peptide Derived from Human Papillomavirus
VPDSDFMDII

SEQ ID NO: 29678 - protein, 9 aa, Artificial Sequence
  Peptide Derived from Human Papillomavirus
VPIYTGPDI

SEQ ID NO: 29679 - protein, 10 aa, Artificial Sequence
  Peptide Derived from Human Papillomavirus
VPIYTGPDII

SEQ ID NO: 29680 - protein, 11 aa, Artificial Sequence
  Peptide Derived from Human Papillomavirus
VPIYTGPDIIL

SEQ ID NO: 29681 - protein, 10 aa, Artificial Sequence
  Peptide Derived from Human Papillomavirus
VPLGGRSNTV

SEQ ID NO: 29682 - protein, 11 aa, Artificial Sequence
  Peptide Derived from Human Papillomavirus
VPLGGRSNTVV

SEQ ID NO: 29683 - protein, 9 aa, Artificial Sequence
  Peptide Derived from Human Papillomavirus
VPLTSAWDV

SEQ ID NO: 29684 - protein, 11 aa, Artificial Sequence
  Peptide Derived from Human Papillomavirus
VPLTSAWDVPI

SEQ ID NO: 29685 - protein, 11 aa, Artificial Sequence
  Peptide Derived from Human Papillomavirus
VPQTGEVSGNI

SEQ ID NO: 29686 - protein, 10 aa, Artificial Sequence
  Peptide Derived from Human Papillomavirus
VPTFTGTSGF

SEQ ID NO: 29687 - protein, 8 aa, Artificial Sequence
  Peptide Derived from Human Papillomavirus
VVASGAPV

SEQ ID NO: 29688 - protein, 11 aa, Artificial Sequence
  Peptide Derived from Human Papillomavirus
VVASGAPVPTF

SEQ ID NO: 29689 - protein, 11 aa, Artificial Sequence
  Peptide Derived from Human Papillomavirus
VVDVGPTRPPV

SEQ ID NO: 29690 - protein, 9 aa, Artificial Sequence
  Peptide Derived from Human Papillomavirus
WPSTSPTNA

SEQ ID NO: 29691 - protein, 9 aa, Artificial Sequence
  Peptide Derived from Human Papillomavirus
YIGIHGTQY

SEQ ID NO: 29692 - protein, 10 aa, Artificial Sequence
  Peptide Derived from Human Papillomavirus
YIGIHGTQYY

SEQ ID NO: 29693 - protein, 11 aa, Artificial Sequence
  Peptide Derived from Human Papillomavirus
YIGIHGTQYYL

SEQ ID NO: 29694 - protein, 8 aa, Artificial Sequence
  Peptide Derived from Human Papillomavirus
YLWPWYYY

SEQ ID NO: 29695 - protein, 9 aa, Artificial Sequence
  Peptide Derived from Human Papillomavirus
YLWPWYYYF

SEQ ID NO: 29696 - protein, 8 aa, Artificial Sequence
  Peptide Derived from Human Papillomavirus
YPKYSLTM

SEQ ID NO: 29697 - protein, 11 aa, Artificial Sequence
  Peptide Derived from Human Papillomavirus
YVPLGGRSNTV

SEQ ID NO: 29698 - protein, 8 aa, Artificial Sequence
  Peptide Derived from Human Papillomavirus
AIEVQIAL

SEQ ID NO: 29699 - protein, 11 aa, Artificial Sequence
  Peptide Derived from Human Papillomavirus
AIEVQIALESL

SEQ ID NO: 29700 - protein, 9 aa, Artificial Sequence
  Peptide Derived from Human Papillomavirus
ALESLSTTI

SEQ ID NO: 29701 - protein, 10 aa, Artificial Sequence
  Peptide Derived from Human Papillomavirus
ALESLSTTIY

SEQ ID NO: 29702 - protein, 9 aa, Artificial Sequence
  Peptide Derived from Human Papillomavirus
CLQVCKAKA

SEQ ID NO: 29703 - protein, 9 aa, Artificial Sequence
  Peptide Derived from Human Papillomavirus
CMQYVAWKY

SEQ ID NO: 29704 - protein, 10 aa, Artificial Sequence
  Peptide Derived from Human Papillomavirus
CMQYVAWKYI

SEQ ID NO: 29705 - protein, 11 aa, Artificial Sequence
  Peptide Derived from Human Papillomavirus
CMQYVAWKYIY

SEQ ID NO: 29706 - protein, 11 aa, Artificial Sequence
  Peptide Derived from Human Papillomavirus
CPDSVSSTCRY

SEQ ID NO: 29707 - protein, 8 aa, Artificial Sequence
  Peptide Derived from Human Papillomavirus
CVTTHTHI

SEQ ID NO: 29708 - protein, 8 aa, Artificial Sequence
  Peptide Derived from Human Papillomavirus
DVTSTYHW

SEQ ID NO: 29709 - protein, 11 aa, Artificial Sequence
  Peptide Derived from Human Papillomavirus
ELWLTEPKKCF

SEQ ID NO: 29710 - protein, 10 aa, Artificial Sequence
  Peptide Derived from Human Papillomavirus
EPNRLKCCRY

SEQ ID NO: 29711 - protein, 9 aa, Artificial Sequence
  Peptide Derived from Human Papillomavirus
EVHMENESI

SEQ ID NO: 29712 - protein, 10 aa, Artificial Sequence
  Peptide Derived from Human Papillomavirus
EVHMENESIY

SEQ ID NO: 29713 - protein, 9 aa, Artificial Sequence
  Peptide Derived from Human Papillomavirus
EVQIALESL

SEQ ID NO: 29714 - protein, 9 aa, Artificial Sequence
  Peptide Derived from Human Papillomavirus
FLSHVKIPV

SEQ ID NO: 29715 - protein, 10 aa, Artificial Sequence
  Peptide Derived from Human Papillomavirus
FLSHVKIPVV

SEQ ID NO: 29716 - protein, 11 aa, Artificial Sequence
  Peptide Derived from Human Papillomavirus
FLSHVKIPVVY

SEQ ID NO: 29717 - protein, 8 aa, Artificial Sequence
  Peptide Derived from Human Papillomavirus
FQKYKTLF

SEQ ID NO: 29718 - protein, 9 aa, Artificial Sequence
  Peptide Derived from Human Papillomavirus
FQKYKTLFV

SEQ ID NO: 29719 - protein, 11 aa, Artificial Sequence
  Peptide Derived from Human Papillomavirus
FQKYKTLFVDV

SEQ ID NO: 29720 - protein, 8 aa, Artificial Sequence
  Peptide Derived from Human Papillomavirus
FVDVTSTY

SEQ ID NO: 29721 - protein, 10 aa, Artificial Sequence
  Peptide Derived from Human Papillomavirus
FVDVTSTYHW

SEQ ID NO: 29722 - protein, 8 aa, Artificial Sequence
  Peptide Derived from Human Papillomavirus
GQHIEVWF

SEQ ID NO: 29723 - protein, 8 aa, Artificial Sequence
  Peptide Derived from Human Papillomavirus
GVDYRGIY

SEQ ID NO: 29724 - protein, 9 aa, Artificial Sequence
  Peptide Derived from Human Papillomavirus
GVDYRGIYY

SEQ ID NO: 29725 - protein, 10 aa, Artificial Sequence
  Peptide Derived from Human Papillomavirus
GVDYRGIYYV

SEQ ID NO: 29726 - protein, 9 aa, Artificial Sequence
  Peptide Derived from Human Papillomavirus
HLKGEPNRL

SEQ ID NO: 29727 - protein, 8 aa, Artificial Sequence
  Peptide Derived from Human Papillomavirus
HMENESIY

SEQ ID NO: 29728 - protein, 9 aa, Artificial Sequence
  Peptide Derived from Human Papillomavirus
HPGDKTTPV

SEQ ID NO: 29729 - protein, 10 aa, Artificial Sequence
  Peptide Derived from Human Papillomavirus
HPGDKTTPVV

SEQ ID NO: 29730 - protein, 8 aa, Artificial Sequence
  Peptide Derived from Human Papillomavirus
HVKIPVVY

SEQ ID NO: 29731 - protein, 10 aa, Artificial Sequence
  Peptide Derived from Human Papillomavirus
HVKIPVVYRL

SEQ ID NO: 29732 - protein, 11 aa, Artificial Sequence
  Peptide Derived from Human Papillomavirus
HVKIPVVYRLV

SEQ ID NO: 29733 - protein, 8 aa, Artificial Sequence
  Peptide Derived from Human Papillomavirus
IPVVYRLV

SEQ ID NO: 29734 - protein, 9 aa, Artificial Sequence
  Peptide Derived from Human Papillomavirus
IPVVYRLVW

SEQ ID NO: 29735 - protein, 8 aa, Artificial Sequence
  Peptide Derived from Human Papillomavirus
KIPVVYRL

SEQ ID NO: 29736 - protein, 9 aa, Artificial Sequence
  Peptide Derived from Human Papillomavirus
KIPVVYRLV

SEQ ID NO: 29737 - protein, 10 aa, Artificial Sequence
  Peptide Derived from Human Papillomavirus
KIPVVYRLVW

SEQ ID NO: 29738 - protein, 8 aa, Artificial Sequence
  Peptide Derived from Human Papillomavirus
KVCSGVDY

SEQ ID NO: 29739 - protein, 11 aa, Artificial Sequence
  Peptide Derived from Human Papillomavirus
KVCSGVDYRGI

SEQ ID NO: 29740 - protein, 8 aa, Artificial Sequence
  Peptide Derived from Human Papillomavirus
LQVCKAKA

SEQ ID NO: 29741 - protein, 11 aa, Artificial Sequence
  Peptide Derived from Human Papillomavirus
LQVCKAKACSA

SEQ ID NO: 29742 - protein, 8 aa, Artificial Sequence
  Peptide Derived from Human Papillomavirus
MQYVAWKY

SEQ ID NO: 29743 - protein, 9 aa, Artificial Sequence
  Peptide Derived from Human Papillomavirus
MQYVAWKYI

SEQ ID NO: 29744 - protein, 10 aa, Artificial Sequence
  Peptide Derived from Human Papillomavirus
MQYVAWKYIY

SEQ ID NO: 29745 - protein, 11 aa, Artificial Sequence
  Peptide Derived from Human Papillomavirus
MQYVAWKYIYY

SEQ ID NO: 29746 - protein, 10 aa, Artificial Sequence
  Peptide Derived from Human Papillomavirus
MVPCLQVCKA

SEQ ID NO: 29747 - protein, 8 aa, Artificial Sequence
  Peptide Derived from Human Papillomavirus
NVSPVETV

SEQ ID NO: 29748 - protein, 11 aa, Artificial Sequence
  Peptide Derived from Human Papillomavirus
NVSPVETVNEY

SEQ ID NO: 29749 - protein, 8 aa, Artificial Sequence
  Peptide Derived from Human Papillomavirus
PVETVNEY

SEQ ID NO: 29750 - protein, 8 aa, Artificial Sequence
  Peptide Derived from Human Papillomavirus
PVVYRLVW

SEQ ID NO: 29751 - protein, 11 aa, Artificial Sequence
  Peptide Derived from Human Papillomavirus
QIALESLSTTI

SEQ ID NO: 29752 - protein, 10 aa, Artificial Sequence
  Peptide Derived from Human Papillomavirus
QVCKAKACSA

SEQ ID NO: 29753 - protein, 11 aa, Artificial Sequence
  Peptide Derived from Human Papillomavirus
QVCKAKACSAI

SEQ ID NO: 29754 - protein, 9 aa, Artificial Sequence
  Peptide Derived from Human Papillomavirus
RLKCCRYRF

SEQ ID NO: 29755 - protein, 8 aa, Artificial Sequence
  Peptide Derived from Human Papillomavirus
RPGKRPRL

SEQ ID NO: 29756 - protein, 9 aa, Artificial Sequence
  Peptide Derived from Human Papillomavirus
RPRLRESEF

SEQ ID NO: 29757 - protein, 8 aa, Artificial Sequence
  Peptide Derived from Human Papillomavirus
SIYCPDSV

SEQ ID NO: 29758 - protein, 9 aa, Artificial Sequence
  Peptide Derived from Human Papillomavirus
SPVETVNEY

SEQ ID NO: 29759 - protein, 8 aa, Artificial Sequence
  Peptide Derived from Human Papillomavirus
SVGNQDAA

SEQ ID NO: 29760 - protein, 9 aa, Artificial Sequence
  Peptide Derived from Human Papillomavirus
SVGNQDAAV

SEQ ID NO: 29761 - protein, 8 aa, Artificial Sequence
  Peptide Derived from Human Papillomavirus
SVSSTCRY

SEQ ID NO: 29762 - protein, 10 aa, Artificial Sequence
  Peptide Derived from Human Papillomavirus
SVSSTCRYNV

SEQ ID NO: 29763 - protein, 8 aa, Artificial Sequence
  Peptide Derived from Human Papillomavirus
TIYNNEEW

SEQ ID NO: 29764 - protein, 10 aa, Artificial Sequence
  Peptide Derived from Human Papillomavirus
TIYNNEEWTL

SEQ ID NO: 29765 - protein, 10 aa, Artificial Sequence
  Peptide Derived from Human Papillomavirus
TLFVDVTSTY

SEQ ID NO: 29766 - protein, 9 aa, Artificial Sequence
  Peptide Derived from Human Papillomavirus
TLRDTCEEL

SEQ ID NO: 29767 - protein, 10 aa, Artificial Sequence
  Peptide Derived from Human Papillomavirus
TLRDTCEELW

SEQ ID NO: 29768 - protein, 11 aa, Artificial Sequence
  Peptide Derived from Human Papillomavirus
TLRDTCEELWL

SEQ ID NO: 29769 - protein, 10 aa, Artificial Sequence
  Peptide Derived from Human Papillomavirus
TQRNSFLSHV

SEQ ID NO: 29770 - protein, 9 aa, Artificial Sequence
  Peptide Derived from Human Papillomavirus
VPCLQVCKA

SEQ ID NO: 29771 - protein, 11 aa, Artificial Sequence
  Peptide Derived from Human Papillomavirus
VPCLQVCKAKA

SEQ ID NO: 29772 - protein, 8 aa, Artificial Sequence
  Peptide Derived from Human Papillomavirus
VQIALESL

SEQ ID NO: 29773 - protein, 11 aa, Artificial Sequence
  Peptide Derived from Human Papillomavirus
VVHLKGEPNRL

SEQ ID NO: 29774 - protein, 9 aa, Artificial Sequence
  Peptide Derived from Human Papillomavirus
WLTEPKKCF

SEQ ID NO: 29775 - protein, 8 aa, Artificial Sequence
  Peptide Derived from Human Papillomavirus
WQKVCSGV

SEQ ID NO: 29776 - protein, 10 aa, Artificial Sequence
  Peptide Derived from Human Papillomavirus
WQKVCSGVDY

SEQ ID NO: 29777 - protein, 10 aa, Artificial Sequence
  Peptide Derived from Human Papillomavirus
YIYYNGDCGW

SEQ ID NO: 29778 - protein, 8 aa, Artificial Sequence
  Peptide Derived from Human Papillomavirus
YVAWKYIY

SEQ ID NO: 29779 - protein, 9 aa, Artificial Sequence
  Peptide Derived from Human Papillomavirus
YVAWKYIYY

SEQ ID NO: 29780 - protein, 9 aa, Artificial Sequence
  Peptide Derived from Human Papillomavirus
YVHDGHKTY

SEQ ID NO: 29781 - protein, 10 aa, Artificial Sequence
  Peptide Derived from Human Papillomavirus
YVHDGHKTYY

SEQ ID NO: 29782 - protein, 8 aa, Artificial Sequence
  Peptide Derived from Human Papillomavirus
AVCRVCLL

SEQ ID NO: 29783 - protein, 9 aa, Artificial Sequence
  Peptide Derived from Human Papillomavirus
AVCRVCLLF

SEQ ID NO: 29784 - protein, 10 aa, Artificial Sequence
  Peptide Derived from Human Papillomavirus
AVCRVCLLFY

SEQ ID NO: 29785 - protein, 8 aa, Artificial Sequence
  Peptide Derived from Human Papillomavirus
CLLFYSKV

SEQ ID NO: 29786 - protein, 11 aa, Artificial Sequence
  Peptide Derived from Human Papillomavirus
CLLFYSKVRKY

SEQ ID NO: 29787 - protein, 8 aa, Artificial Sequence
  Peptide Derived from Human Papillomavirus
CVYCKKEL

SEQ ID NO: 29788 - protein, 11 aa, Artificial Sequence
  Peptide Derived from Human Papillomavirus
CVYCKKELTRA

SEQ ID NO: 29789 - protein, 8 aa, Artificial Sequence
  Peptide Derived from Human Papillomavirus
DLRLSCVY

SEQ ID NO: 29790 - protein, 9 aa, Artificial Sequence
  Peptide Derived from Human Papillomavirus
EIPLIDLRL

SEQ ID NO: 29791 - protein, 10 aa, Artificial Sequence
  Peptide Derived from Human Papillomavirus
ELKLVYRDDF

SEQ ID NO: 29792 - protein, 8 aa, Artificial Sequence
  Peptide Derived from Human Papillomavirus
ELTRAEVY

SEQ ID NO: 29793 - protein, 10 aa, Artificial Sequence
  Peptide Derived from Human Papillomavirus
ELTRAEVYNF

SEQ ID NO: 29794 - protein, 11 aa, Artificial Sequence
  Peptide Derived from Human Papillomavirus
ELTRAEVYNFA

SEQ ID NO: 29795 - protein, 8 aa, Artificial Sequence
  Peptide Derived from Human Papillomavirus
EVLEIPLI

SEQ ID NO: 29796 - protein, 10 aa, Artificial Sequence
  Peptide Derived from Human Papillomavirus
EVLEIPLIDL

SEQ ID NO: 29797 - protein, 10 aa, Artificial Sequence
  Peptide Derived from Human Papillomavirus
EVYNFACTEL

SEQ ID NO: 29798 - protein, 8 aa, Artificial Sequence
  Peptide Derived from Human Papillomavirus
FPYAVCRV

SEQ ID NO: 29799 - protein, 10 aa, Artificial Sequence
  Peptide Derived from Human Papillomavirus
FPYAVCRVCL

SEQ ID NO: 29800 - protein, 11 aa, Artificial Sequence
  Peptide Derived from Human Papillomavirus
FPYAVCRVCLL

SEQ ID NO: 29801 - protein, 8 aa, Artificial Sequence
  Peptide Derived from Human Papillomavirus
HLSEVLEI

SEQ ID NO: 29802 - protein, 10 aa, Artificial Sequence
  Peptide Derived from Human Papillomavirus
HLSEVLEIPL

SEQ ID NO: 29803 - protein, 11 aa, Artificial Sequence
  Peptide Derived from Human Papillomavirus
HLSEVLEIPLI

SEQ ID NO: 29804 - protein, 8 aa, Artificial Sequence
  Peptide Derived from Human Papillomavirus
IPLIDLRL

SEQ ID NO: 29805 - protein, 11 aa, Artificial Sequence
  Peptide Derived from Human Papillomavirus
IPLIDLRLSCV

SEQ ID NO: 29806 - protein, 8 aa, Artificial Sequence
  Peptide Derived from Human Papillomavirus
KLVYRDDF

SEQ ID NO: 29807 - protein, 10 aa, Artificial Sequence
  Peptide Derived from Human Papillomavirus
KLVYRDDFPY

SEQ ID NO: 29808 - protein, 11 aa, Artificial Sequence
  Peptide Derived from Human Papillomavirus
KLVYRDDFPYA

SEQ ID NO: 29809 - protein, 8 aa, Artificial Sequence
  Peptide Derived from Human Papillomavirus
KQLCDLLI

SEQ ID NO: 29810 - protein, 11 aa, Artificial Sequence
  Peptide Derived from Human Papillomavirus
KQLCDLLIRCY

SEQ ID NO: 29811 - protein, 11 aa, Artificial Sequence
  Peptide Derived from Human Papillomavirus
KQLHCDRKRRF

SEQ ID NO: 29812 - protein, 8 aa, Artificial Sequence
  Peptide Derived from Human Papillomavirus
KVRKYRYY

SEQ ID NO: 29813 - protein, 10 aa, Artificial Sequence
  Peptide Derived from Human Papillomavirus
KVRKYRYYDY

SEQ ID NO: 29814 - protein, 11 aa, Artificial Sequence
  Peptide Derived from Human Papillomavirus
LIAHGWTGSCL

SEQ ID NO: 29815 - protein, 9 aa, Artificial Sequence
  Peptide Derived from Human Papillomavirus
LIDLRLSCV

SEQ ID NO: 29816 - protein, 10 aa, Artificial Sequence
  Peptide Derived from Human Papillomavirus
LIDLRLSCVY

SEQ ID NO: 29817 - protein, 11 aa, Artificial Sequence
  Peptide Derived from Human Papillomavirus
LIRCYRCQSPL

SEQ ID NO: 29818 - protein, 10 aa, Artificial Sequence
  Peptide Derived from Human Papillomavirus
LLFYSKVRKY

SEQ ID NO: 29819 - protein, 9 aa, Artificial Sequence
  Peptide Derived from Human Papillomavirus
LVYRDDFPY

SEQ ID NO: 29820 - protein, 10 aa, Artificial Sequence
  Peptide Derived from Human Papillomavirus
LVYRDDFPYA

SEQ ID NO: 29821 - protein, 11 aa, Artificial Sequence
  Peptide Derived from Human Papillomavirus
LVYRDDFPYAV

SEQ ID NO: 29822 - protein, 9 aa, Artificial Sequence
  Peptide Derived from Human Papillomavirus
NPQERPRSL

SEQ ID NO: 29823 - protein, 10 aa, Artificial Sequence
  Peptide Derived from Human Papillomavirus
PLIDLRLSCV

SEQ ID NO: 29824 - protein, 11 aa, Artificial Sequence
  Peptide Derived from Human Papillomavirus
PLIDLRLSCVY

SEQ ID NO: 29825 - protein, 9 aa, Artificial Sequence
  Peptide Derived from Human Papillomavirus
PLTPEEKQL

SEQ ID NO: 29826 - protein, 8 aa, Artificial Sequence
  Peptide Derived from Human Papillomavirus
PQERPRSL

SEQ ID NO: 29827 - protein, 11 aa, Artificial Sequence
  Peptide Derived from Human Papillomavirus
PQERPRSLHHL

SEQ ID NO: 29828 - protein, 10 aa, Artificial Sequence
  Peptide Derived from Human Papillomavirus
QLCDLLIRCY

SEQ ID NO: 29829 - protein, 10 aa, Artificial Sequence
  Peptide Derived from Human Papillomavirus
QLHCDRKRRF

SEQ ID NO: 29830 - protein, 11 aa, Artificial Sequence
  Peptide Derived from Human Papillomavirus
RLSCVYCKKEL

SEQ ID NO: 29831 - protein, 8 aa, Artificial Sequence
  Peptide Derived from Human Papillomavirus
RPRSLHHL

SEQ ID NO: 29832 - protein, 11 aa, Artificial Sequence
  Peptide Derived from Human Papillomavirus
RPRSLHHLSEV

SEQ ID NO: 29833 - protein, 10 aa, Artificial Sequence
  Peptide Derived from Human Papillomavirus
RVCLLFYSKV

SEQ ID NO: 29834 - protein, 10 aa, Artificial Sequence
  Peptide Derived from Human Papillomavirus
SITKKQLCDL

SEQ ID NO: 29835 - protein, 11 aa, Artificial Sequence
  Peptide Derived from Human Papillomavirus
SITKKQLCDLL

SEQ ID NO: 29836 - protein, 8 aa, Artificial Sequence
  Peptide Derived from Human Papillomavirus
SLHHLSEV

SEQ ID NO: 29837 - protein, 9 aa, Artificial Sequence
  Peptide Derived from Human Papillomavirus
SLHHLSEVL

SEQ ID NO: 29838 - protein, 11 aa, Artificial Sequence
  Peptide Derived from Human Papillomavirus
SLHHLSEVLEI

SEQ ID NO: 29839 - protein, 10 aa, Artificial Sequence
  Peptide Derived from Human Papillomavirus
SPLTPEEKQL

SEQ ID NO: 29840 - protein, 10 aa, Artificial Sequence
  Peptide Derived from Human Papillomavirus
SVYGATLESI

SEQ ID NO: 29841 - protein, 10 aa, Artificial Sequence
  Peptide Derived from Human Papillomavirus
TLESITKKQL

SEQ ID NO: 29842 - protein, 9 aa, Artificial Sequence
  Peptide Derived from Human Papillomavirus
VLEIPLIDL

SEQ ID NO: 29843 - protein, 11 aa, Artificial Sequence
  Peptide Derived from Human Papillomavirus
VLEIPLIDLRL

SEQ ID NO: 29844 - protein, 8 aa, Artificial Sequence
  Peptide Derived from Human Papillomavirus
ALTVTCPL

SEQ ID NO: 29845 - protein, 10 aa, Artificial Sequence
  Peptide Derived from Human Papillomavirus
ALTVTCPLCA

SEQ ID NO: 29846 - protein, 9 aa, Artificial Sequence
  Peptide Derived from Human Papillomavirus
DIQSTKEDL

SEQ ID NO: 29847 - protein, 11 aa, Artificial Sequence
  Peptide Derived from Human Papillomavirus
DIQSTKEDLRV

SEQ ID NO: 29848 - protein, 8 aa, Artificial Sequence
  Peptide Derived from Human Papillomavirus
DLQCNEQL

SEQ ID NO: 29849 - protein, 8 aa, Artificial Sequence
  Peptide Derived from Human Papillomavirus
DLRVVQQL

SEQ ID NO: 29850 - protein, 9 aa, Artificial Sequence
  Peptide Derived from Human Papillomavirus
DLRVVQQLL

SEQ ID NO: 29851 - protein, 10 aa, Artificial Sequence
  Peptide Derived from Human Papillomavirus
DLRVVQQLLM

SEQ ID NO: 29852 - protein, 10 aa, Artificial Sequence
  Peptide Derived from Human Papillomavirus
EIDLQCNEQL

SEQ ID NO: 29853 - protein, 8 aa, Artificial Sequence
  Peptide Derived from Human Papillomavirus
ELTPQTEI

SEQ ID NO: 29854 - protein, 10 aa, Artificial Sequence
  Peptide Derived from Human Papillomavirus
ELTPQTEIDL

SEQ ID NO: 29855 - protein, 9 aa, Artificial Sequence
  Peptide Derived from Human Papillomavirus
HLQERPQQA

SEQ ID NO: 29856 - protein, 9 aa, Artificial Sequence
  Peptide Derived from Human Papillomavirus
HVPCCECKF

SEQ ID NO: 29857 - protein, 10 aa, Artificial Sequence
  Peptide Derived from Human Papillomavirus
HVPCCECKFV

SEQ ID NO: 29858 - protein, 11 aa, Artificial Sequence
  Peptide Derived from Human Papillomavirus
HVPCCECKFVV

SEQ ID NO: 29859 - protein, 8 aa, Artificial Sequence
  Peptide Derived from Human Papillomavirus
IQSTKEDL

SEQ ID NO: 29860 - protein, 10 aa, Artificial Sequence
  Peptide Derived from Human Papillomavirus
IQSTKEDLRV

SEQ ID NO: 29861 - protein, 11 aa, Artificial Sequence
  Peptide Derived from Human Papillomavirus
IQSTKEDLRVV

SEQ ID NO: 29862 - protein, 8 aa, Artificial Sequence
  Peptide Derived from Human Papillomavirus
KQHTCYLI

SEQ ID NO: 29863 - protein, 10 aa, Artificial Sequence
  Peptide Derived from Human Papillomavirus
KQHTCYLIHV

SEQ ID NO: 29864 - protein, 8 aa, Artificial Sequence
  Peptide Derived from Human Papillomavirus
KVPTLQDV

SEQ ID NO: 29865 - protein, 9 aa, Artificial Sequence
  Peptide Derived from Human Papillomavirus
KVPTLQDVV

SEQ ID NO: 29866 - protein, 10 aa, Artificial Sequence
  Peptide Derived from Human Papillomavirus
KVPTLQDVVL

SEQ ID NO: 29867 - protein, 11 aa, Artificial Sequence
  Peptide Derived from Human Papillomavirus
LIHVPCCECKF

SEQ ID NO: 29868 - protein, 8 aa, Artificial Sequence
  Peptide Derived from Human Papillomavirus
LLMGALTV

SEQ ID NO: 29869 - protein, 11 aa, Artificial Sequence
  Peptide Derived from Human Papillomavirus
LMGALTVTCPL

SEQ ID NO: 29870 - protein, 8 aa, Artificial Sequence
  Peptide Derived from Human Papillomavirus
LQDVVLEL

SEQ ID NO: 29871 - protein, 8 aa, Artificial Sequence
  Peptide Derived from Human Papillomavirus
LQERPQQA

SEQ ID NO: 29872 - protein, 11 aa, Artificial Sequence
  Peptide Derived from Human Papillomavirus
LQERPQQARQA

SEQ ID NO: 29873 - protein, 11 aa, Artificial Sequence
  Peptide Derived from Human Papillomavirus
QLDIQSTKEDL

SEQ ID NO: 29874 - protein, 9 aa, Artificial Sequence
  Peptide Derived from Human Papillomavirus
QLLMGALTV

SEQ ID NO: 29875 - protein, 8 aa, Artificial Sequence
  Peptide Derived from Human Papillomavirus
QQLLMGAL

SEQ ID NO: 29876 - protein, 10 aa, Artificial Sequence
  Peptide Derived from Human Papillomavirus
QQLLMGALTV

SEQ ID NO: 29877 - protein, 8 aa, Artificial Sequence
  Peptide Derived from Human Papillomavirus
RPQQARQA

SEQ ID NO: 29878 - protein, 9 aa, Artificial Sequence
  Peptide Derived from Human Papillomavirus
RQAKQHTCY

SEQ ID NO: 29879 - protein, 10 aa, Artificial Sequence
  Peptide Derived from Human Papillomavirus
RQAKQHTCYL

SEQ ID NO: 29880 - protein, 11 aa, Artificial Sequence
  Peptide Derived from Human Papillomavirus
RQAKQHTCYLI

SEQ ID NO: 29881 - protein, 8 aa, Artificial Sequence
  Peptide Derived from Human Papillomavirus
RVVQQLLM

SEQ ID NO: 29882 - protein, 10 aa, Artificial Sequence
  Peptide Derived from Human Papillomavirus
RVVQQLLMGA

SEQ ID NO: 29883 - protein, 11 aa, Artificial Sequence
  Peptide Derived from Human Papillomavirus
RVVQQLLMGAL

SEQ ID NO: 29884 - protein, 9 aa, Artificial Sequence
  Peptide Derived from Human Papillomavirus
TLQDVVLEL

SEQ ID NO: 29885 - protein, 8 aa, Artificial Sequence
  Peptide Derived from Human Papillomavirus
TPQTEIDL

SEQ ID NO: 29886 - protein, 8 aa, Artificial Sequence
  Peptide Derived from Human Papillomavirus
TVTCPLCA

SEQ ID NO: 29887 - protein, 10 aa, Artificial Sequence
  Peptide Derived from Human Papillomavirus
VLELTPQTEI

SEQ ID NO: 29888 - protein, 8 aa, Artificial Sequence
  Peptide Derived from Human Papillomavirus
VPCCECKF

SEQ ID NO: 29889 - protein, 9 aa, Artificial Sequence
  Peptide Derived from Human Papillomavirus
VPCCECKFV

SEQ ID NO: 29890 - protein, 10 aa, Artificial Sequence
  Peptide Derived from Human Papillomavirus
VPCCECKFVV

SEQ ID NO: 29891 - protein, 8 aa, Artificial Sequence
  Peptide Derived from Human Papillomavirus
VPTLQDVV

SEQ ID NO: 29892 - protein, 9 aa, Artificial Sequence
  Peptide Derived from Human Papillomavirus
VPTLQDVVL

SEQ ID NO: 29893 - protein, 11 aa, Artificial Sequence
  Peptide Derived from Human Papillomavirus
VPTLQDVVLEL

SEQ ID NO: 29894 - protein, 8 aa, Artificial Sequence
  Peptide Derived from Human Papillomavirus
VQQLLMGA

SEQ ID NO: 29895 - protein, 9 aa, Artificial Sequence
  Peptide Derived from Human Papillomavirus
VQQLLMGAL

SEQ ID NO: 29896 - protein, 11 aa, Artificial Sequence
  Peptide Derived from Human Papillomavirus
VQQLLMGALTV

SEQ ID NO: 29897 - protein, 11 aa, Artificial Sequence
  Peptide Derived from Human Papillomavirus
VVLELTPQTEI

SEQ ID NO: 29898 - protein, 9 aa, Artificial Sequence
  Peptide Derived from Human Papillomavirus
VVQQLLMGA

SEQ ID NO: 29899 - protein, 10 aa, Artificial Sequence
  Peptide Derived from Human Papillomavirus
VVQQLLMGAL

SEQ ID NO: 29900 - protein, 10 aa, Artificial Sequence
  Peptide Derived from Human Papillomavirus
AMGEHWTKGA

SEQ ID NO: 29901 - protein, 11 aa, Artificial Sequence
  Peptide Derived from Human Papillomavirus
AMGEHWTKGAV

SEQ ID NO: 29902 - protein, 9 aa, Artificial Sequence
  Peptide Derived from Human Papillomavirus
APTSTSTPA

SEQ ID NO: 29903 - protein, 8 aa, Artificial Sequence
  Peptide Derived from Human Papillomavirus
AQGHNNGI

SEQ ID NO: 29904 - protein, 10 aa, Artificial Sequence
  Peptide Derived from Human Papillomavirus
AQGHNNGICW

SEQ ID NO: 29905 - protein, 8 aa, Artificial Sequence
  Peptide Derived from Human Papillomavirus
AQLFNKPY

SEQ ID NO: 29906 - protein, 9 aa, Artificial Sequence
  Peptide Derived from Human Papillomavirus
AQLFNKPYW

SEQ ID NO: 29907 - protein, 10 aa, Artificial Sequence
  Peptide Derived from Human Papillomavirus
AQLFNKPYWL

SEQ ID NO: 29908 - protein, 10 aa, Artificial Sequence
  Peptide Derived from Human Papillomavirus
AVATSKKRSA

SEQ ID NO: 29909 - protein, 8 aa, Artificial Sequence
  Peptide Derived from Human Papillomavirus
AVCKSTQV

SEQ ID NO: 29910 - protein, 9 aa, Artificial Sequence
  Peptide Derived from Human Papillomavirus
AVGHPYYSV

SEQ ID NO: 29911 - protein, 8 aa, Artificial Sequence
  Peptide Derived from Human Papillomavirus
AVNVFPIF

SEQ ID NO: 29912 - protein, 9 aa, Artificial Sequence
  Peptide Derived from Human Papillomavirus
AVNVFPIFL

SEQ ID NO: 29913 - protein, 11 aa, Artificial Sequence
  Peptide Derived from Human Papillomavirus
AVNVFPIFLQM

SEQ ID NO: 29914 - protein, 8 aa, Artificial Sequence
  Peptide Derived from Human Papillomavirus
CIFLDVGA

SEQ ID NO: 29915 - protein, 9 aa, Artificial Sequence
  Peptide Derived from Human Papillomavirus
CIFLDVGAV

SEQ ID NO: 29916 - protein, 11 aa, Artificial Sequence
  Peptide Derived from Human Papillomavirus
CIFLDVGAVNV

SEQ ID NO: 29917 - protein, 8 aa, Artificial Sequence
  Peptide Derived from Human Papillomavirus
CIVGCTPA

SEQ ID NO: 29918 - protein, 9 aa, Artificial Sequence
  Peptide Derived from Human Papillomavirus
CIVGCTPAM

SEQ ID NO: 29919 - protein, 11 aa, Artificial Sequence
  Peptide Derived from Human Papillomavirus
CPPLALINTPI

SEQ ID NO: 29920 - protein, 9 aa, Artificial Sequence
  Peptide Derived from Human Papillomavirus
DIVQSTCKY

SEQ ID NO: 29921 - protein, 11 aa, Artificial Sequence
  Peptide Derived from Human Papillomavirus
DLDQFPLGRKF

SEQ ID NO: 29922 - protein, 9 aa, Artificial Sequence
  Peptide Derived from Human Papillomavirus
DMIDTGFGA

SEQ ID NO: 29923 - protein, 10 aa, Artificial Sequence
  Peptide Derived from Human Papillomavirus
DMIDTGFGAM

SEQ ID NO: 29924 - protein, 8 aa, Artificial Sequence
  Peptide Derived from Human Papillomavirus
DPLAKYKF

SEQ ID NO: 29925 - protein, 9 aa, Artificial Sequence
  Peptide Derived from Human Papillomavirus
DPLAKYKFW

SEQ ID NO: 29926 - protein, 11 aa, Artificial Sequence
  Peptide Derived from Human Papillomavirus
DPLAKYKFWDV

SEQ ID NO: 29927 - protein, 8 aa, Artificial Sequence
  Peptide Derived from Human Papillomavirus
DPPLHYGL

SEQ ID NO: 29928 - protein, 10 aa, Artificial Sequence
  Peptide Derived from Human Papillomavirus
DPPLHYGLCI

SEQ ID NO: 29929 - protein, 11 aa, Artificial Sequence
  Peptide Derived from Human Papillomavirus
DPPLHYGLCIF

SEQ ID NO: 29930 - protein, 8 aa, Artificial Sequence
  Peptide Derived from Human Papillomavirus
DQERLVWA

SEQ ID NO: 29931 - protein, 10 aa, Artificial Sequence
  Peptide Derived from Human Papillomavirus
DQERLVWACV

SEQ ID NO: 29932 - protein, 9 aa, Artificial Sequence
  Peptide Derived from Human Papillomavirus
DQFPLGRKF

SEQ ID NO: 29933 - protein, 10 aa, Artificial Sequence
  Peptide Derived from Human Papillomavirus
DQFPLGRKFL

SEQ ID NO: 29934 - protein, 11 aa, Artificial Sequence
  Peptide Derived from Human Papillomavirus
DQFPLGRKFLM

SEQ ID NO: 29935 - protein, 8 aa, Artificial Sequence
  Peptide Derived from Human Papillomavirus
DVGAVNVF

SEQ ID NO: 29936 - protein, 10 aa, Artificial Sequence
  Peptide Derived from Human Papillomavirus
DVGAVNVFPI

SEQ ID NO: 29937 - protein, 11 aa, Artificial Sequence
  Peptide Derived from Human Papillomavirus
DVGAVNVFPIF

SEQ ID NO: 29938 - protein, 8 aa, Artificial Sequence
  Peptide Derived from Human Papillomavirus
DVNLQDSF

SEQ ID NO: 29939 - protein, 8 aa, Artificial Sequence
  Peptide Derived from Human Papillomavirus
ELQFVFQL

SEQ ID NO: 29940 - protein, 11 aa, Artificial Sequence
  Peptide Derived from Human Papillomavirus
ELQFVFQLCKI

SEQ ID NO: 29941 - protein, 8 aa, Artificial Sequence
  Peptide Derived from Human Papillomavirus
EPPPSSVY

SEQ ID NO: 29942 - protein, 9 aa, Artificial Sequence
  Peptide Derived from Human Papillomavirus
EPPPSSVYV

SEQ ID NO: 29943 - protein, 10 aa, Artificial Sequence
  Peptide Derived from Human Papillomavirus
EPPPSSVYVA

SEQ ID NO: 29944 - protein, 8 aa, Artificial Sequence
  Peptide Derived from Human Papillomavirus
EQLFARHY

SEQ ID NO: 29945 - protein, 9 aa, Artificial Sequence
  Peptide Derived from Human Papillomavirus
EQLFARHYF

SEQ ID NO: 29946 - protein, 8 aa, Artificial Sequence
  Peptide Derived from Human Papillomavirus
EQLSKYDA

SEQ ID NO: 29947 - protein, 11 aa, Artificial Sequence
  Peptide Derived from Human Papillomavirus
EQLSKYDARKI

SEQ ID NO: 29948 - protein, 11 aa, Artificial Sequence
  Peptide Derived from Human Papillomavirus
EQPPTEKQDPL

SEQ ID NO: 29949 - protein, 8 aa, Artificial Sequence
  Peptide Derived from Human Papillomavirus
EVGRGQPL

SEQ ID NO: 29950 - protein, 10 aa, Artificial Sequence
  Peptide Derived from Human Papillomavirus
EVGRGQPLGA

SEQ ID NO: 29951 - protein, 9 aa, Artificial Sequence
  Peptide Derived from Human Papillomavirus
EVMAYLHNM

SEQ ID NO: 29952 - protein, 11 aa, Artificial Sequence
  Peptide Derived from Human Papillomavirus
EVMAYLHNMNA

SEQ ID NO: 29953 - protein, 9 aa, Artificial Sequence
  Peptide Derived from Human Papillomavirus
FLDVGAVNV

SEQ ID NO: 29954 - protein, 10 aa, Artificial Sequence
  Peptide Derived from Human Papillomavirus
FLDVGAVNVF

SEQ ID NO: 29955 - protein, 8 aa, Artificial Sequence
  Peptide Derived from Human Papillomavirus
FPIFLQMA

SEQ ID NO: 29956 - protein, 10 aa, Artificial Sequence
  Peptide Derived from Human Papillomavirus
FPIFLQMATW

SEQ ID NO: 29957 - protein, 8 aa, Artificial Sequence
  Peptide Derived from Human Papillomavirus
FPLGRKFL

SEQ ID NO: 29958 - protein, 9 aa, Artificial Sequence
  Peptide Derived from Human Papillomavirus
FPLGRKFLM

SEQ ID NO: 29959 - protein, 11 aa, Artificial Sequence
  Peptide Derived from Human Papillomavirus
FPLGRKFLMQL

SEQ ID NO: 29960 - protein, 8 aa, Artificial Sequence
  Peptide Derived from Human Papillomavirus
FQLCKITL

SEQ ID NO: 29961 - protein, 10 aa, Artificial Sequence
  Peptide Derived from Human Papillomavirus
FQLCKITLSA

SEQ ID NO: 29962 - protein, 8 aa, Artificial Sequence
  Peptide Derived from Human Papillomavirus
FVFQLCKI

SEQ ID NO: 29963 - protein, 10 aa, Artificial Sequence
  Peptide Derived from Human Papillomavirus
FVFQLCKITL

SEQ ID NO: 29964 - protein, 8 aa, Artificial Sequence
  Peptide Derived from Human Papillomavirus
GICWGNQL

SEQ ID NO: 29965 - protein, 9 aa, Artificial Sequence
  Peptide Derived from Human Papillomavirus
GICWGNQLF

SEQ ID NO: 29966 - protein, 10 aa, Artificial Sequence
  Peptide Derived from Human Papillomavirus
GICWGNQLFV

SEQ ID NO: 29967 - protein, 8 aa, Artificial Sequence
  Peptide Derived from Human Papillomavirus
GLCIFLDV

SEQ ID NO: 29968 - protein, 10 aa, Artificial Sequence
  Peptide Derived from Human Papillomavirus
GLCIFLDVGA

SEQ ID NO: 29969 - protein, 11 aa, Artificial Sequence
  Peptide Derived from Human Papillomavirus
GLCIFLDVGAV

SEQ ID NO: 29970 - protein, 10 aa, Artificial Sequence
  Peptide Derived from Human Papillomavirus
GLEVGRGQPL

SEQ ID NO: 29971 - protein, 8 aa, Artificial Sequence
  Peptide Derived from Human Papillomavirus
GLPDTNIY

SEQ ID NO: 29972 - protein, 8 aa, Artificial Sequence
  Peptide Derived from Human Papillomavirus
GLSGHPLF

SEQ ID NO: 29973 - protein, 11 aa, Artificial Sequence
  Peptide Derived from Human Papillomavirus
GLSGHPLFNRL

SEQ ID NO: 29974 - protein, 10 aa, Artificial Sequence
  Peptide Derived from Human Papillomavirus
GLSPPVATSL

SEQ ID NO: 29975 - protein, 8 aa, Artificial Sequence
  Peptide Derived from Human Papillomavirus
GQPLGAGL

SEQ ID NO: 29976 - protein, 9 aa, Artificial Sequence
  Peptide Derived from Human Papillomavirus
HVEEYELQF

SEQ ID NO: 29977 - protein, 10 aa, Artificial Sequence
  Peptide Derived from Human Papillomavirus
HVEEYELQFV

SEQ ID NO: 29978 - protein, 11 aa, Artificial Sequence
  Peptide Derived from Human Papillomavirus
HVEEYELQFVF

SEQ ID NO: 29979 - protein, 9 aa, Artificial Sequence
  Peptide Derived from Human Papillomavirus
IPKVSAYQY

SEQ ID NO: 29980 - protein, 11 aa, Artificial Sequence
  Peptide Derived from Human Papillomavirus
IPKVSAYQYRV

SEQ ID NO: 29981 - protein, 8 aa, Artificial Sequence
  Peptide Derived from Human Papillomavirus
IVGCTPAM

SEQ ID NO: 29982 - protein, 8 aa, Artificial Sequence
  Peptide Derived from Human Papillomavirus
IVQSTCKY

SEQ ID NO: 29983 - protein, 11 aa, Artificial Sequence
  Peptide Derived from Human Papillomavirus
IVQSTCKYPDY

SEQ ID NO: 29984 - protein, 9 aa, Artificial Sequence
  Peptide Derived from Human Papillomavirus
KINQYLRHV

SEQ ID NO: 29985 - protein, 8 aa, Artificial Sequence
  Peptide Derived from Human Papillomavirus
KITLSAEV

SEQ ID NO: 29986 - protein, 9 aa, Artificial Sequence
  Peptide Derived from Human Papillomavirus
KITLSAEVM

SEQ ID NO: 29987 - protein, 10 aa, Artificial Sequence
  Peptide Derived from Human Papillomavirus
KITLSAEVMA

SEQ ID NO: 29988 - protein, 11 aa, Artificial Sequence
  Peptide Derived from Human Papillomavirus
KITLSAEVMAY

SEQ ID NO: 29989 - protein, 11 aa, Artificial Sequence
  Peptide Derived from Human Papillomavirus
KMSADAYGDSM

SEQ ID NO: 29990 - protein, 8 aa, Artificial Sequence
  Peptide Derived from Human Papillomavirus
KPYWLQRA

SEQ ID NO: 29991 - protein, 8 aa, Artificial Sequence
  Peptide Derived from Human Papillomavirus
KQDPLAKY

SEQ ID NO: 29992 - protein, 10 aa, Artificial Sequence
  Peptide Derived from Human Papillomavirus
KQDPLAKYKF

SEQ ID NO: 29993 - protein, 11 aa, Artificial Sequence
  Peptide Derived from Human Papillomavirus
KQDPLAKYKFW

SEQ ID NO: 29994 - protein, 8 aa, Artificial Sequence
  Peptide Derived from Human Papillomavirus
KQTQLCIV

SEQ ID NO: 29995 - protein, 8 aa, Artificial Sequence
  Peptide Derived from Human Papillomavirus
KVGETIPA

SEQ ID NO: 29996 - protein, 10 aa, Artificial Sequence
  Peptide Derived from Human Papillomavirus
KVGETIPAEL

SEQ ID NO: 29997 - protein, 11 aa, Artificial Sequence
  Peptide Derived from Human Papillomavirus
KVGETIPAELY

SEQ ID NO: 29998 - protein, 8 aa, Artificial Sequence
  Peptide Derived from Human Papillomavirus
KVLQESKA

SEQ ID NO: 29999 - protein, 10 aa, Artificial Sequence
  Peptide Derived from Human Papillomavirus
KVLQESKAEV

SEQ ID NO: 30000 - protein, 9 aa, Artificial Sequence
  Peptide Derived from Human Papillomavirus
KVSAYQYRV

SEQ ID NO: 30001 - protein, 10 aa, Artificial Sequence
  Peptide Derived from Human Papillomavirus
KVSAYQYRVF

SEQ ID NO: 30002 - protein, 8 aa, Artificial Sequence
  Peptide Derived from Human Papillomavirus
KVVATDSY

SEQ ID NO: 30003 - protein, 9 aa, Artificial Sequence
  Peptide Derived from Human Papillomavirus
KVVATDSYV

SEQ ID NO: 30004 - protein, 9 aa, Artificial Sequence
  Peptide Derived from Human Papillomavirus
KVYLPPTPV

SEQ ID NO: 30005 - protein, 11 aa, Artificial Sequence
  Peptide Derived from Human Papillomavirus
LINTPIEDGDM

SEQ ID NO: 30006 - protein, 8 aa, Artificial Sequence
  Peptide Derived from Human Papillomavirus
LLAVGHPY

SEQ ID NO: 30007 - protein, 9 aa, Artificial Sequence
  Peptide Derived from Human Papillomavirus
LLAVGHPYY

SEQ ID NO: 30008 - protein, 11 aa, Artificial Sequence
  Peptide Derived from Human Papillomavirus
LLAVGHPYYSV

SEQ ID NO: 30009 - protein, 9 aa, Artificial Sequence
  Peptide Derived from Human Papillomavirus
LLEDWNIGL

SEQ ID NO: 30010 - protein, 11 aa, Artificial Sequence
  Peptide Derived from Human Papillomavirus
LMQLGTRSKPA

SEQ ID NO: 30011 - protein, 9 aa, Artificial Sequence
  Peptide Derived from Human Papillomavirus
LPDPNKFGL

SEQ ID NO: 30012 - protein, 9 aa, Artificial Sequence
  Peptide Derived from Human Papillomavirus
LPPTPVSKV

SEQ ID NO: 30013 - protein, 10 aa, Artificial Sequence
  Peptide Derived from Human Papillomavirus
LPPTPVSKVV

SEQ ID NO: 30014 - protein, 11 aa, Artificial Sequence
  Peptide Derived from Human Papillomavirus
LPPTPVSKVVA

SEQ ID NO: 30015 - protein, 9 aa, Artificial Sequence
  Peptide Derived from Human Papillomavirus
LQDSFSTDL

SEQ ID NO: 30016 - protein, 8 aa, Artificial Sequence
  Peptide Derived from Human Papillomavirus
LQESKAEV

SEQ ID NO: 30017 - protein, 10 aa, Artificial Sequence
  Peptide Derived from Human Papillomavirus
LQESKAEVPL

SEQ ID NO: 30018 - protein, 10 aa, Artificial Sequence
  Peptide Derived from Human Papillomavirus
LQFVFQLCKI

SEQ ID NO: 30019 - protein, 11 aa, Artificial Sequence
  Peptide Derived from Human Papillomavirus
LQRAQGHNNGI

SEQ ID NO: 30020 - protein, 8 aa, Artificial Sequence
  Peptide Derived from Human Papillomavirus
LVWACVGL

SEQ ID NO: 30021 - protein, 10 aa, Artificial Sequence
  Peptide Derived from Human Papillomavirus
LVWACVGLEV

SEQ ID NO: 30022 - protein, 8 aa, Artificial Sequence
  Peptide Derived from Human Papillomavirus
MIDTGFGA

SEQ ID NO: 30023 - protein, 9 aa, Artificial Sequence
  Peptide Derived from Human Papillomavirus
MIDTGFGAM

SEQ ID NO: 30024 - protein, 11 aa, Artificial Sequence
  Peptide Derived from Human Papillomavirus
MIDTGFGAMDF

SEQ ID NO: 30025 - protein, 8 aa, Artificial Sequence
  Peptide Derived from Human Papillomavirus
MITSEAQL

SEQ ID NO: 30026 - protein, 9 aa, Artificial Sequence
  Peptide Derived from Human Papillomavirus
MITSEAQLF

SEQ ID NO: 30027 - protein, 8 aa, Artificial Sequence
  Peptide Derived from Human Papillomavirus
MLPMMYIY

SEQ ID NO: 30028 - protein, 8 aa, Artificial Sequence
  Peptide Derived from Human Papillomavirus
MMLPMMYI

SEQ ID NO: 30029 - protein, 9 aa, Artificial Sequence
  Peptide Derived from Human Papillomavirus
MMLPMMYIY

SEQ ID NO: 30030 - protein, 10 aa, Artificial Sequence
  Peptide Derived from Human Papillomavirus
MMYIYRDPPL

SEQ ID NO: 30031 - protein, 10 aa, Artificial Sequence
  Peptide Derived from Human Papillomavirus
MQLGTRSKPA

SEQ ID NO: 30032 - protein, 11 aa, Artificial Sequence
  Peptide Derived from Human Papillomavirus
MQLGTRSKPAV

SEQ ID NO: 30033 - protein, 8 aa, Artificial Sequence
  Peptide Derived from Human Papillomavirus
NIGLSPPV

SEQ ID NO: 30034 - protein, 9 aa, Artificial Sequence
  Peptide Derived from Human Papillomavirus
NIGLSPPVA

SEQ ID NO: 30035 - protein, 8 aa, Artificial Sequence
  Peptide Derived from Human Papillomavirus
NIPKVSAY

SEQ ID NO: 30036 - protein, 10 aa, Artificial Sequence
  Peptide Derived from Human Papillomavirus
NIPKVSAYQY

SEQ ID NO: 30037 - protein, 11 aa, Artificial Sequence
  Peptide Derived from Human Papillomavirus
NISVDGKQTQL

SEQ ID NO: 30038 - protein, 10 aa, Artificial Sequence
  Peptide Derived from Human Papillomavirus
NIYNPDQERL

SEQ ID NO: 30039 - protein, 11 aa, Artificial Sequence
  Peptide Derived from Human Papillomavirus
NIYNPDQERLV

SEQ ID NO: 30040 - protein, 8 aa, Artificial Sequence
  Peptide Derived from Human Papillomavirus
NLANNNVI

SEQ ID NO: 30041 - protein, 8 aa, Artificial Sequence
  Peptide Derived from Human Papillomavirus
NLLEDWNI

SEQ ID NO: 30042 - protein, 10 aa, Artificial Sequence
  Peptide Derived from Human Papillomavirus
NLLEDWNIGL

SEQ ID NO: 30043 - protein, 10 aa, Artificial Sequence
  Peptide Derived from Human Papillomavirus
NLQDSFSTDL

SEQ ID NO: 30044 - protein, 10 aa, Artificial Sequence
  Peptide Derived from Human Papillomavirus
NMNANLLEDW

SEQ ID NO: 30045 - protein, 11 aa, Artificial Sequence
  Peptide Derived from Human Papillomavirus
NMTISTATEQL

SEQ ID NO: 30046 - protein, 8 aa, Artificial Sequence
  Peptide Derived from Human Papillomavirus
NPDQERLV

SEQ ID NO: 30047 - protein, 9 aa, Artificial Sequence
  Peptide Derived from Human Papillomavirus
NPDQERLVW

SEQ ID NO: 30048 - protein, 10 aa, Artificial Sequence
  Peptide Derived from Human Papillomavirus
NPDQERLVWA

SEQ ID NO: 30049 - protein, 8 aa, Artificial Sequence
  Peptide Derived from Human Papillomavirus
NQLFVTVV

SEQ ID NO: 30050 - protein, 10 aa, Artificial Sequence
  Peptide Derived from Human Papillomavirus
NQYLRHVEEY

SEQ ID NO: 30051 - protein, 9 aa, Artificial Sequence
  Peptide Derived from Human Papillomavirus
NVFPIFLQM

SEQ ID NO: 30052 - protein, 10 aa, Artificial Sequence
  Peptide Derived from Human Papillomavirus
NVFPIFLQMA

SEQ ID NO: 30053 - protein, 10 aa, Artificial Sequence
  Peptide Derived from Human Papillomavirus
NVIEDSRDNI

SEQ ID NO: 30054 - protein, 8 aa, Artificial Sequence
  Peptide Derived from Human Papillomavirus
PIEDGDMI

SEQ ID NO: 30055 - protein, 9 aa, Artificial Sequence
  Peptide Derived from Human Papillomavirus
PIFLQMATW

SEQ ID NO: 30056 - protein, 8 aa, Artificial Sequence
  Peptide Derived from Human Papillomavirus
PLAKYKFW

SEQ ID NO: 30057 - protein, 10 aa, Artificial Sequence
  Peptide Derived from Human Papillomavirus
PLAKYKFWDV

SEQ ID NO: 30058 - protein, 9 aa, Artificial Sequence
  Peptide Derived from Human Papillomavirus
PLALINTPI

SEQ ID NO: 30059 - protein, 11 aa, Artificial Sequence
  Peptide Derived from Human Papillomavirus
PLDIVQSTCKY

SEQ ID NO: 30060 - protein, 11 aa, Artificial Sequence
  Peptide Derived from Human Papillomavirus
PLGAGLSGHPL

SEQ ID NO: 30061 - protein, 8 aa, Artificial Sequence
  Peptide Derived from Human Papillomavirus
PLGRKFLM

SEQ ID NO: 30062 - protein, 10 aa, Artificial Sequence
  Peptide Derived from Human Papillomavirus
PLGRKFLMQL

SEQ ID NO: 30063 - protein, 8 aa, Artificial Sequence
  Peptide Derived from Human Papillomavirus
PLHYGLCI

SEQ ID NO: 30064 - protein, 9 aa, Artificial Sequence
  Peptide Derived from Human Papillomavirus
PLHYGLCIF

SEQ ID NO: 30065 - protein, 10 aa, Artificial Sequence
  Peptide Derived from Human Papillomavirus
PLHYGLCIFL

SEQ ID NO: 30066 - protein, 11 aa, Artificial Sequence
  Peptide Derived from Human Papillomavirus
PMMYIYRDPPL

SEQ ID NO: 30067 - protein, 10 aa, Artificial Sequence
  Peptide Derived from Human Papillomavirus
PPLALINTPI

SEQ ID NO: 30068 - protein, 9 aa, Artificial Sequence
  Peptide Derived from Human Papillomavirus
PPLHYGLCI

SEQ ID NO: 30069 - protein, 10 aa, Artificial Sequence
  Peptide Derived from Human Papillomavirus
PPLHYGLCIF

SEQ ID NO: 30070 - protein, 11 aa, Artificial Sequence
  Peptide Derived from Human Papillomavirus
PPLHYGLCIFL

SEQ ID NO: 30071 - protein, 8 aa, Artificial Sequence
  Peptide Derived from Human Papillomavirus
PPPSSVYV

SEQ ID NO: 30072 - protein, 9 aa, Artificial Sequence
  Peptide Derived from Human Papillomavirus
PPPSSVYVA

SEQ ID NO: 30073 - protein, 8 aa, Artificial Sequence
  Peptide Derived from Human Papillomavirus
PPSSVYVA

SEQ ID NO: 30074 - protein, 9 aa, Artificial Sequence
  Peptide Derived from Human Papillomavirus
PPTEKQDPL

SEQ ID NO: 30075 - protein, 10 aa, Artificial Sequence
  Peptide Derived from Human Papillomavirus
PPTEKQDPLA

SEQ ID NO: 30076 - protein, 8 aa, Artificial Sequence
  Peptide Derived from Human Papillomavirus
PPTPVSKV

SEQ ID NO: 30077 - protein, 9 aa, Artificial Sequence
  Peptide Derived from Human Papillomavirus
PPTPVSKVV

SEQ ID NO: 30078 - protein, 10 aa, Artificial Sequence
  Peptide Derived from Human Papillomavirus
PPTPVSKVVA

SEQ ID NO: 30079 - protein, 11 aa, Artificial Sequence
  Peptide Derived from Human Papillomavirus
PPVATSLEDKY

SEQ ID NO: 30080 - protein, 10 aa, Artificial Sequence
  Peptide Derived from Human Papillomavirus
PVATSLEDKY

SEQ ID NO: 30081 - protein, 11 aa, Artificial Sequence
  Peptide Derived from Human Papillomavirus
PVSKVVATDSY

SEQ ID NO: 30082 - protein, 10 aa, Artificial Sequence
  Peptide Derived from Human Papillomavirus
QLCIVGCTPA

SEQ ID NO: 30083 - protein, 11 aa, Artificial Sequence
  Peptide Derived from Human Papillomavirus
QLCIVGCTPAM

SEQ ID NO: 30084 - protein, 9 aa, Artificial Sequence
  Peptide Derived from Human Papillomavirus
QLCKITLSA

SEQ ID NO: 30085 - protein, 11 aa, Artificial Sequence
  Peptide Derived from Human Papillomavirus
QLCKITLSAEV

SEQ ID NO: 30086 - protein, 8 aa, Artificial Sequence
  Peptide Derived from Human Papillomavirus
QLFARHYF

SEQ ID NO: 30087 - protein, 11 aa, Artificial Sequence
  Peptide Derived from Human Papillomavirus
QLFARHYFNRA

SEQ ID NO: 30088 - protein, 8 aa, Artificial Sequence
  Peptide Derived from Human Papillomavirus
QLFNKPYW

SEQ ID NO: 30089 - protein, 9 aa, Artificial Sequence
  Peptide Derived from Human Papillomavirus
QLFNKPYWL

SEQ ID NO: 30090 - protein, 9 aa, Artificial Sequence
  Peptide Derived from Human Papillomavirus
QLGTRSKPA

SEQ ID NO: 30091 - protein, 10 aa, Artificial Sequence
  Peptide Derived from Human Papillomavirus
QLGTRSKPAV

SEQ ID NO: 30092 - protein, 11 aa, Artificial Sequence
  Peptide Derived from Human Papillomavirus
QLGTRSKPAVA

SEQ ID NO: 30093 - protein, 10 aa, Artificial Sequence
  Peptide Derived from Human Papillomavirus
QLSKYDARKI

SEQ ID NO: 30094 - protein, 10 aa, Artificial Sequence
  Peptide Derived from Human Papillomavirus
QPPTEKQDPL

SEQ ID NO: 30095 - protein, 11 aa, Artificial Sequence
  Peptide Derived from Human Papillomavirus
QPPTEKQDPLA

SEQ ID NO: 30096 - protein, 10 aa, Artificial Sequence
  Peptide Derived from Human Papillomavirus
QVTTGDCPPL

SEQ ID NO: 30097 - protein, 11 aa, Artificial Sequence
  Peptide Derived from Human Papillomavirus
QVTTGDCPPLA

SEQ ID NO: 30098 - protein, 10 aa, Artificial Sequence
  Peptide Derived from Human Papillomavirus
RLDDTESSNL

SEQ ID NO: 30099 - protein, 11 aa, Artificial Sequence
  Peptide Derived from Human Papillomavirus
RLDDTESSNLA

SEQ ID NO: 30100 - protein, 9 aa, Artificial Sequence
  Peptide Derived from Human Papillomavirus
RLLAVGHPY

SEQ ID NO: 30101 - protein, 10 aa, Artificial Sequence
  Peptide Derived from Human Papillomavirus
RLLAVGHPYY

SEQ ID NO: 30102 - protein, 8 aa, Artificial Sequence
  Peptide Derived from Human Papillomavirus
RLPDPNKF

SEQ ID NO: 30103 - protein, 10 aa, Artificial Sequence
  Peptide Derived from Human Papillomavirus
RLPDPNKFGL

SEQ ID NO: 30104 - protein, 9 aa, Artificial Sequence
  Peptide Derived from Human Papillomavirus
RLVWACVGL

SEQ ID NO: 30105 - protein, 11 aa, Artificial Sequence
  Peptide Derived from Human Papillomavirus
RLVWACVGLEV

SEQ ID NO: 30106 - protein, 8 aa, Artificial Sequence
  Peptide Derived from Human Papillomavirus
RPSENKVY

SEQ ID NO: 30107 - protein, 9 aa, Artificial Sequence
  Peptide Derived from Human Papillomavirus
RPSENKVYL

SEQ ID NO: 30108 - protein, 10 aa, Artificial Sequence
  Peptide Derived from Human Papillomavirus
RVRLPDPNKF

SEQ ID NO: 30109 - protein, 11 aa, Artificial Sequence
  Peptide Derived from Human Papillomavirus
SIFYHAGSSRL

SEQ ID NO: 30110 - protein, 8 aa, Artificial Sequence
  Peptide Derived from Human Papillomavirus
SLEDKYRY

SEQ ID NO: 30111 - protein, 9 aa, Artificial Sequence
  Peptide Derived from Human Papillomavirus
SLEDKYRYV

SEQ ID NO: 30112 - protein, 9 aa, Artificial Sequence
  Peptide Derived from Human Papillomavirus
SMITSEAQL

SEQ ID NO: 30113 - protein, 10 aa, Artificial Sequence
  Peptide Derived from Human Papillomavirus
SMITSEAQLF

SEQ ID NO: 30114 - protein, 11 aa, Artificial Sequence
  Peptide Derived from Human Papillomavirus
SMWFYLRREQL

SEQ ID NO: 30115 - protein, 8 aa, Artificial Sequence
  Peptide Derived from Human Papillomavirus
SPPVATSL

SEQ ID NO: 30116 - protein, 9 aa, Artificial Sequence
  Peptide Derived from Human Papillomavirus
SVDGKQTQL

SEQ ID NO: 30117 - protein, 11 aa, Artificial Sequence
  Peptide Derived from Human Papillomavirus
SVDGKQTQLCI

SEQ ID NO: 30118 - protein, 11 aa, Artificial Sequence
  Peptide Derived from Human Papillomavirus
SVTKDNTKTNI

SEQ ID NO: 30119 - protein, 11 aa, Artificial Sequence
  Peptide Derived from Human Papillomavirus
SVYVATPSGSM

SEQ ID NO: 30120 - protein, 8 aa, Artificial Sequence
  Peptide Derived from Human Papillomavirus
TIPAELYL

SEQ ID NO: 30121 - protein, 9 aa, Artificial Sequence
  Peptide Derived from Human Papillomavirus
TISTATEQL

SEQ ID NO: 30122 - protein, 8 aa, Artificial Sequence
  Peptide Derived from Human Papillomavirus
TLSAEVMA

SEQ ID NO: 30123 - protein, 9 aa, Artificial Sequence
  Peptide Derived from Human Papillomavirus
TLSAEVMAY

SEQ ID NO: 30124 - protein, 10 aa, Artificial Sequence
  Peptide Derived from Human Papillomavirus
TLSAEVMAYL

SEQ ID NO: 30125 - protein, 8 aa, Artificial Sequence
  Peptide Derived from Human Papillomavirus
TPAMGEHW

SEQ ID NO: 30126 - protein, 8 aa, Artificial Sequence
  Peptide Derived from Human Papillomavirus
TPIEDGDM

SEQ ID NO: 30127 - protein, 9 aa, Artificial Sequence
  Peptide Derived from Human Papillomavirus
TPIEDGDMI

SEQ ID NO: 30128 - protein, 11 aa, Artificial Sequence
  Peptide Derived from Human Papillomavirus
TPSGSMITSEA

SEQ ID NO: 30129 - protein, 8 aa, Artificial Sequence
  Peptide Derived from Human Papillomavirus
TPVSKVVA

SEQ ID NO: 30130 - protein, 11 aa, Artificial Sequence
  Peptide Derived from Human Papillomavirus
TQLCIVGCTPA

SEQ ID NO: 30131 - protein, 11 aa, Artificial Sequence
  Peptide Derived from Human Papillomavirus
TQVTTGDCPPL

SEQ ID NO: 30132 - protein, 11 aa, Artificial Sequence
  Peptide Derived from Human Papillomavirus
TVVDTTRSTNM

SEQ ID NO: 30133 - protein, 9 aa, Artificial Sequence
  Peptide Derived from Human Papillomavirus
VIEDSRDNI

SEQ ID NO: 30134 - protein, 11 aa, Artificial Sequence
  Peptide Derived from Human Papillomavirus
VIEDSRDNISV

SEQ ID NO: 30135 - protein, 9 aa, Artificial Sequence
  Peptide Derived from Human Papillomavirus
VLQESKAEV

SEQ ID NO: 30136 - protein, 11 aa, Artificial Sequence
  Peptide Derived from Human Papillomavirus
VLQESKAEVPL

SEQ ID NO: 30137 - protein, 8 aa, Artificial Sequence
  Peptide Derived from Human Papillomavirus
VMAYLHNM

SEQ ID NO: 30138 - protein, 10 aa, Artificial Sequence
  Peptide Derived from Human Papillomavirus
VMAYLHNMNA

SEQ ID NO: 30139 - protein, 10 aa, Artificial Sequence
  Peptide Derived from Human Papillomavirus
VQSTCKYPDY

SEQ ID NO: 30140 - protein, 11 aa, Artificial Sequence
  Peptide Derived from Human Papillomavirus
VQSTCKYPDYL

SEQ ID NO: 30141 - protein, 8 aa, Artificial Sequence
  Peptide Derived from Human Papillomavirus
VVATDSYV

SEQ ID NO: 30142 - protein, 10 aa, Artificial Sequence
  Peptide Derived from Human Papillomavirus
VVDTTRSTNM

SEQ ID NO: 30143 - protein, 8 aa, Artificial Sequence
  Peptide Derived from Human Papillomavirus
YIYRDPPL

SEQ ID NO: 30144 - protein, 10 aa, Artificial Sequence
  Peptide Derived from Human Papillomavirus
YIYRDPPLHY

SEQ ID NO: 30145 - protein, 9 aa, Artificial Sequence
  Peptide Derived from Human Papillomavirus
YLHNMNANL

SEQ ID NO: 30146 - protein, 10 aa, Artificial Sequence
  Peptide Derived from Human Papillomavirus
YLHNMNANLL

SEQ ID NO: 30147 - protein, 8 aa, Artificial Sequence
  Peptide Derived from Human Papillomavirus
YLKMSADA

SEQ ID NO: 30148 - protein, 9 aa, Artificial Sequence
  Peptide Derived from Human Papillomavirus
YLKMSADAY

SEQ ID NO: 30149 - protein, 10 aa, Artificial Sequence
  Peptide Derived from Human Papillomavirus
YLPPTPVSKV

SEQ ID NO: 30150 - protein, 11 aa, Artificial Sequence
  Peptide Derived from Human Papillomavirus
YLPPTPVSKVV

SEQ ID NO: 30151 - protein, 8 aa, Artificial Sequence
  Peptide Derived from Human Papillomavirus
YLRHVEEY

SEQ ID NO: 30152 - protein, 10 aa, Artificial Sequence
  Peptide Derived from Human Papillomavirus
YLRHVEEYEL

SEQ ID NO: 30153 - protein, 8 aa, Artificial Sequence
  Peptide Derived from Human Papillomavirus
YLRREQLF

SEQ ID NO: 30154 - protein, 9 aa, Artificial Sequence
  Peptide Derived from Human Papillomavirus
YLRREQLFA

SEQ ID NO: 30155 - protein, 9 aa, Artificial Sequence
  Peptide Derived from Human Papillomavirus
YPDYLKMSA

SEQ ID NO: 30156 - protein, 11 aa, Artificial Sequence
  Peptide Derived from Human Papillomavirus
YPDYLKMSADA

SEQ ID NO: 30157 - protein, 8 aa, Artificial Sequence
  Peptide Derived from Human Papillomavirus
YQYRVFRV

SEQ ID NO: 30158 - protein, 10 aa, Artificial Sequence
  Peptide Derived from Human Papillomavirus
YQYRVFRVRL

SEQ ID NO: 30159 - protein, 9 aa, Artificial Sequence
  Peptide Derived from Human Papillomavirus
YVATPSGSM

SEQ ID NO: 30160 - protein, 10 aa, Artificial Sequence
  Peptide Derived from Human Papillomavirus
YVATPSGSMI

SEQ ID NO: 30161 - protein, 8 aa, Artificial Sequence
  Peptide Derived from Human Papillomavirus
YVKRTSIF

SEQ ID NO: 30162 - protein, 9 aa, Artificial Sequence
  Peptide Derived from Human Papillomavirus
YVKRTSIFY

SEQ ID NO: 30163 - protein, 11 aa, Artificial Sequence
  Peptide Derived from Human Papillomavirus
YVKRTSIFYHA

SEQ ID NO: 30164 - protein, 8 aa, Artificial Sequence
  Peptide Derived from Human Papillomavirus
ALWPVYFF

SEQ ID NO: 30165 - protein, 9 aa, Artificial Sequence
  Peptide Derived from Human Papillomavirus
APDPDFMNI

SEQ ID NO: 30166 - protein, 10 aa, Artificial Sequence
  Peptide Derived from Human Papillomavirus
APDPDFMNIV

SEQ ID NO: 30167 - protein, 11 aa, Artificial Sequence
  Peptide Derived from Human Papillomavirus
APDPDFMNIVA

SEQ ID NO: 30168 - protein, 9 aa, Artificial Sequence
  Peptide Derived from Human Papillomavirus
APGLSSQSV

SEQ ID NO: 30169 - protein, 10 aa, Artificial Sequence
  Peptide Derived from Human Papillomavirus
APGLSSQSVA

SEQ ID NO: 30170 - protein, 11 aa, Artificial Sequence
  Peptide Derived from Human Papillomavirus
APLGNVWETPF

SEQ ID NO: 30171 - protein, 11 aa, Artificial Sequence
  Peptide Derived from Human Papillomavirus
APQTGEVSGNI

SEQ ID NO: 30172 - protein, 8 aa, Artificial Sequence
  Peptide Derived from Human Papillomavirus
APRLYRKA

SEQ ID NO: 30173 - protein, 9 aa, Artificial Sequence
  Peptide Derived from Human Papillomavirus
APRLYRKAF

SEQ ID NO: 30174 - protein, 8 aa, Artificial Sequence
  Peptide Derived from Human Papillomavirus
AQAEEIEM

SEQ ID NO: 30175 - protein, 11 aa, Artificial Sequence
  Peptide Derived from Human Papillomavirus
AQAEEIEMQPL

SEQ ID NO: 30176 - protein, 10 aa, Artificial Sequence
  Peptide Derived from Human Papillomavirus
AVHGSGTEPI

SEQ ID NO: 30177 - protein, 9 aa, Artificial Sequence
  Peptide Derived from Human Papillomavirus
CPEDVVNKI

SEQ ID NO: 30178 - protein, 8 aa, Artificial Sequence
  Peptide Derived from Human Papillomavirus
DISPIAQA

SEQ ID NO: 30179 - protein, 11 aa, Artificial Sequence
  Peptide Derived from Human Papillomavirus
DISPIAQAEEI

SEQ ID NO: 30180 - protein, 9 aa, Artificial Sequence
  Peptide Derived from Human Papillomavirus
DITPTSSTV

SEQ ID NO: 30181 - protein, 11 aa, Artificial Sequence
  Peptide Derived from Human Papillomavirus
DITPTSSTVHV

SEQ ID NO: 30182 - protein, 11 aa, Artificial Sequence
  Peptide Derived from Human Papillomavirus
DIVLPTGPSTW

SEQ ID NO: 30183 - protein, 10 aa, Artificial Sequence
  Peptide Derived from Human Papillomavirus
DIYANIDDEA

SEQ ID NO: 30184 - protein, 9 aa, Artificial Sequence
  Peptide Derived from Human Papillomavirus
DPAFLDRPA

SEQ ID NO: 30185 - protein, 11 aa, Artificial Sequence
  Peptide Derived from Human Papillomavirus
DPAFLDRPATL

SEQ ID NO: 30186 - protein, 8 aa, Artificial Sequence
  Peptide Derived from Human Papillomavirus
DPDFMNIV

SEQ ID NO: 30187 - protein, 9 aa, Artificial Sequence
  Peptide Derived from Human Papillomavirus
DPDFMNIVA

SEQ ID NO: 30188 - protein, 10 aa, Artificial Sequence
  Peptide Derived from Human Papillomavirus
DPDFMNIVAL

SEQ ID NO: 30189 - protein, 8 aa, Artificial Sequence
  Peptide Derived from Human Papillomavirus
DPSIVTLV

SEQ ID NO: 30190 - protein, 8 aa, Artificial Sequence
  Peptide Derived from Human Papillomavirus
DVTHDVYI

SEQ ID NO: 30191 - protein, 9 aa, Artificial Sequence
  Peptide Derived from Human Papillomavirus
DVTPARPPI

SEQ ID NO: 30192 - protein, 10 aa, Artificial Sequence
  Peptide Derived from Human Papillomavirus
DVTPARPPIV

SEQ ID NO: 30193 - protein, 11 aa, Artificial Sequence
  Peptide Derived from Human Papillomavirus
DVTPARPPIVV

SEQ ID NO: 30194 - protein, 11 aa, Artificial Sequence
  Peptide Derived from Human Papillomavirus
DVVNKIEQKTW

SEQ ID NO: 30195 - protein, 9 aa, Artificial Sequence
  Peptide Derived from Human Papillomavirus
DVYIQGSSF

SEQ ID NO: 30196 - protein, 10 aa, Artificial Sequence
  Peptide Derived from Human Papillomavirus
DVYIQGSSFA

SEQ ID NO: 30197 - protein, 11 aa, Artificial Sequence
  Peptide Derived from Human Papillomavirus
DVYIQGSSFAL

SEQ ID NO: 30198 - protein, 8 aa, Artificial Sequence
  Peptide Derived from Human Papillomavirus
EIEMQPLL

SEQ ID NO: 30199 - protein, 10 aa, Artificial Sequence
  Peptide Derived from Human Papillomavirus
EIEMQPLLSA

SEQ ID NO: 30200 - protein, 8 aa, Artificial Sequence
  Peptide Derived from Human Papillomavirus
EIPMQTFA

SEQ ID NO: 30201 - protein, 9 aa, Artificial Sequence
  Peptide Derived from Human Papillomavirus
EIPMQTFAV

SEQ ID NO: 30202 - protein, 11 aa, Artificial Sequence
  Peptide Derived from Human Papillomavirus
EITSSSTTTPA

SEQ ID NO: 30203 - protein, 8 aa, Artificial Sequence
  Peptide Derived from Human Papillomavirus
EMQPLLSA

SEQ ID NO: 30204 - protein, 8 aa, Artificial Sequence
  Peptide Derived from Human Papillomavirus
EPISSTPI

SEQ ID NO: 30205 - protein, 11 aa, Artificial Sequence
  Peptide Derived from Human Papillomavirus
EPISSTPIPGF

SEQ ID NO: 30206 - protein, 9 aa, Artificial Sequence
  Peptide Derived from Human Papillomavirus
EQKTWADKI

SEQ ID NO: 30207 - protein, 10 aa, Artificial Sequence
  Peptide Derived from Human Papillomavirus
EQKTWADKIL

SEQ ID NO: 30208 - protein, 8 aa, Artificial Sequence
  Peptide Derived from Human Papillomavirus
EVSGNILI

SEQ ID NO: 30209 - protein, 9 aa, Artificial Sequence
  Peptide Derived from Human Papillomavirus
FIDPPVIEA

SEQ ID NO: 30210 - protein, 8 aa, Artificial Sequence
  Peptide Derived from Human Papillomavirus
FLDRPATL

SEQ ID NO: 30211 - protein, 9 aa, Artificial Sequence
  Peptide Derived from Human Papillomavirus
FLDRPATLV

SEQ ID NO: 30212 - protein, 11 aa, Artificial Sequence
  Peptide Derived from Human Papillomavirus
FLDRPATLVSA

SEQ ID NO: 30213 - protein, 11 aa, Artificial Sequence
  Peptide Derived from Human Papillomavirus
FMNIVALHRPA

SEQ ID NO: 30214 - protein, 10 aa, Artificial Sequence
  Peptide Derived from Human Papillomavirus
FQQVKVTDPA

SEQ ID NO: 30215 - protein, 11 aa, Artificial Sequence
  Peptide Derived from Human Papillomavirus
FQQVKVTDPAF

SEQ ID NO: 30216 - protein, 9 aa, Artificial Sequence
  Peptide Derived from Human Papillomavirus
FVPQSPYDV

SEQ ID NO: 30217 - protein, 8 aa, Artificial Sequence
  Peptide Derived from Human Papillomavirus
GIHSYEEI

SEQ ID NO: 30218 - protein, 10 aa, Artificial Sequence
  Peptide Derived from Human Papillomavirus
GIHSYEEIPM

SEQ ID NO: 30219 - protein, 11 aa, Artificial Sequence
  Peptide Derived from Human Papillomavirus
GIPNFTGSGGF

SEQ ID NO: 30220 - protein, 8 aa, Artificial Sequence
  Peptide Derived from Human Papillomavirus
GLSSQSVA

SEQ ID NO: 30221 - protein, 9 aa, Artificial Sequence
  Peptide Derived from Human Papillomavirus
GLYDIYANI

SEQ ID NO: 30222 - protein, 8 aa, Artificial Sequence
  Peptide Derived from Human Papillomavirus
GPSTWPFV

SEQ ID NO: 30223 - protein, 8 aa, Artificial Sequence
  Peptide Derived from Human Papillomavirus
GPTDPSIV

SEQ ID NO: 30224 - protein, 10 aa, Artificial Sequence
  Peptide Derived from Human Papillomavirus
GPTDPSIVTL

SEQ ID NO: 30225 - protein, 11 aa, Artificial Sequence
  Peptide Derived from Human Papillomavirus
GPTDPSIVTLV

SEQ ID NO: 30226 - protein, 8 aa, Artificial Sequence
  Peptide Derived from Human Papillomavirus
GVAPDPDF

SEQ ID NO: 30227 - protein, 9 aa, Artificial Sequence
  Peptide Derived from Human Papillomavirus
GVAPDPDFM

SEQ ID NO: 30228 - protein, 11 aa, Artificial Sequence
  Peptide Derived from Human Papillomavirus
GVAPDPDFMNI

SEQ ID NO: 30229 - protein, 11 aa, Artificial Sequence
  Peptide Derived from Human Papillomavirus
GVRFSRLGRKA

SEQ ID NO: 30230 - protein, 8 aa, Artificial Sequence
  Peptide Derived from Human Papillomavirus
HITNPLFI

SEQ ID NO: 30231 - protein, 9 aa, Artificial Sequence
  Peptide Derived from Human Papillomavirus
HLPIKPSTL

SEQ ID NO: 30232 - protein, 11 aa, Artificial Sequence
  Peptide Derived from Human Papillomavirus
HLPIKPSTLSF

SEQ ID NO: 30233 - protein, 11 aa, Artificial Sequence
  Peptide Derived from Human Papillomavirus
HVSSTHITNPL

SEQ ID NO: 30234 - protein, 10 aa, Artificial Sequence
  Peptide Derived from Human Papillomavirus
ILISTPTSGI

SEQ ID NO: 30235 - protein, 8 aa, Artificial Sequence
  Peptide Derived from Human Papillomavirus
ILQWGSLF

SEQ ID NO: 30236 - protein, 10 aa, Artificial Sequence
  Peptide Derived from Human Papillomavirus
ILQWGSLFTY

SEQ ID NO: 30237 - protein, 11 aa, Artificial Sequence
  Peptide Derived from Human Papillomavirus
ILQWGSLFTYF

SEQ ID NO: 30238 - protein, 8 aa, Artificial Sequence
  Peptide Derived from Human Papillomavirus
IPGFRRIA

SEQ ID NO: 30239 - protein, 9 aa, Artificial Sequence
  Peptide Derived from Human Papillomavirus
IPGFRRIAA

SEQ ID NO: 30240 - protein, 8 aa, Artificial Sequence
  Peptide Derived from Human Papillomavirus
IPMQTFAV

SEQ ID NO: 30241 - protein, 10 aa, Artificial Sequence
  Peptide Derived from Human Papillomavirus
IPNFTGSGGF

SEQ ID NO: 30242 - protein, 10 aa, Artificial Sequence
  Peptide Derived from Human Papillomavirus
IPYFFADGDV

SEQ ID NO: 30243 - protein, 11 aa, Artificial Sequence
  Peptide Derived from Human Papillomavirus
IPYFFADGDVA

SEQ ID NO: 30244 - protein, 8 aa, Artificial Sequence
  Peptide Derived from Human Papillomavirus
IQGSSFAL

SEQ ID NO: 30245 - protein, 9 aa, Artificial Sequence
  Peptide Derived from Human Papillomavirus
IQGSSFALW

SEQ ID NO: 30246 - protein, 11 aa, Artificial Sequence
  Peptide Derived from Human Papillomavirus
IQGSSFALWPV

SEQ ID NO: 30247 - protein, 9 aa, Artificial Sequence
  Peptide Derived from Human Papillomavirus
IQTRRGTQI

SEQ ID NO: 30248 - protein, 11 aa, Artificial Sequence
  Peptide Derived from Human Papillomavirus
IQTRRGTQIGA

SEQ ID NO: 30249 - protein, 8 aa, Artificial Sequence
  Peptide Derived from Human Papillomavirus
IVALHRPA

SEQ ID NO: 30250 - protein, 9 aa, Artificial Sequence
  Peptide Derived from Human Papillomavirus
IVALHRPAF

SEQ ID NO: 30251 - protein, 11 aa, Artificial Sequence
  Peptide Derived from Human Papillomavirus
IVDVTPARPPI

SEQ ID NO: 30252 - protein, 10 aa, Artificial Sequence
  Peptide Derived from Human Papillomavirus
IVLPTGPSTW

SEQ ID NO: 30253 - protein, 10 aa, Artificial Sequence
  Peptide Derived from Human Papillomavirus
IVTLVEESSV

SEQ ID NO: 30254 - protein, 11 aa, Artificial Sequence
  Peptide Derived from Human Papillomavirus
IVTLVEESSVI

SEQ ID NO: 30255 - protein, 8 aa, Artificial Sequence
  Peptide Derived from Human Papillomavirus
KIEQKTWA

SEQ ID NO: 30256 - protein, 11 aa, Artificial Sequence
  Peptide Derived from Human Papillomavirus
KIEQKTWADKI

SEQ ID NO: 30257 - protein, 8 aa, Artificial Sequence
  Peptide Derived from Human Papillomavirus
KILQWGSL

SEQ ID NO: 30258 - protein, 9 aa, Artificial Sequence
  Peptide Derived from Human Papillomavirus
KILQWGSLF

SEQ ID NO: 30259 - protein, 11 aa, Artificial Sequence
  Peptide Derived from Human Papillomavirus
KILQWGSLFTY

SEQ ID NO: 30260 - protein, 10 aa, Artificial Sequence
  Peptide Derived from Human Papillomavirus
KLSGTCPEDV

SEQ ID NO: 30261 - protein, 11 aa, Artificial Sequence
  Peptide Derived from Human Papillomavirus
KLSGTCPEDVV

SEQ ID NO: 30262 - protein, 8 aa, Artificial Sequence
  Peptide Derived from Human Papillomavirus
KPSTLSFA

SEQ ID NO: 30263 - protein, 8 aa, Artificial Sequence
  Peptide Derived from Human Papillomavirus
KVTDPAFL

SEQ ID NO: 30264 - protein, 9 aa, Artificial Sequence
  Peptide Derived from Human Papillomavirus
LISTPTSGI

SEQ ID NO: 30265 - protein, 8 aa, Artificial Sequence
  Peptide Derived from Human Papillomavirus
LLSANNSF

SEQ ID NO: 30266 - protein, 11 aa, Artificial Sequence
  Peptide Derived from Human Papillomavirus
LLSANNSFDGL

SEQ ID NO: 30267 - protein, 8 aa, Artificial Sequence
  Peptide Derived from Human Papillomavirus
LPIKPSTL

SEQ ID NO: 30268 - protein, 10 aa, Artificial Sequence
  Peptide Derived from Human Papillomavirus
LPIKPSTLSF

SEQ ID NO: 30269 - protein, 11 aa, Artificial Sequence
  Peptide Derived from Human Papillomavirus
LPIKPSTLSFA

SEQ ID NO: 30270 - protein, 8 aa, Artificial Sequence
  Peptide Derived from Human Papillomavirus
LPTGPSTW

SEQ ID NO: 30271 - protein, 10 aa, Artificial Sequence
  Peptide Derived from Human Papillomavirus
LPTGPSTWPF

SEQ ID NO: 30272 - protein, 11 aa, Artificial Sequence
  Peptide Derived from Human Papillomavirus
LPTGPSTWPFV

SEQ ID NO: 30273 - protein, 9 aa, Artificial Sequence
  Peptide Derived from Human Papillomavirus
LQWGSLFTY

SEQ ID NO: 30274 - protein, 10 aa, Artificial Sequence
  Peptide Derived from Human Papillomavirus
LQWGSLFTYF

SEQ ID NO: 30275 - protein, 8 aa, Artificial Sequence
  Peptide Derived from Human Papillomavirus
LVEESSVI

SEQ ID NO: 30276 - protein, 8 aa, Artificial Sequence
  Peptide Derived from Human Papillomavirus
LVSADNPL

SEQ ID NO: 30277 - protein, 9 aa, Artificial Sequence
  Peptide Derived from Human Papillomavirus
LVSADNPLF

SEQ ID NO: 30278 - protein, 11 aa, Artificial Sequence
  Peptide Derived from Human Papillomavirus
MQPLLSANNSF

SEQ ID NO: 30279 - protein, 9 aa, Artificial Sequence
  Peptide Derived from Human Papillomavirus
NIDDEAPGL

SEQ ID NO: 30280 - protein, 11 aa, Artificial Sequence
  Peptide Derived from Human Papillomavirus
NILISTPTSGI

SEQ ID NO: 30281 - protein, 9 aa, Artificial Sequence
  Peptide Derived from Human Papillomavirus
NIVALHRPA

SEQ ID NO: 30282 - protein, 10 aa, Artificial Sequence
  Peptide Derived from Human Papillomavirus
NIVALHRPAF

SEQ ID NO: 30283 - protein, 11 aa, Artificial Sequence
  Peptide Derived from Human Papillomavirus
NPLFEGTDTSL

SEQ ID NO: 30284 - protein, 9 aa, Artificial Sequence
  Peptide Derived from Human Papillomavirus
NPLFIDPPV

SEQ ID NO: 30285 - protein, 10 aa, Artificial Sequence
  Peptide Derived from Human Papillomavirus
NPLFIDPPVI

SEQ ID NO: 30286 - protein, 9 aa, Artificial Sequence
  Peptide Derived from Human Papillomavirus
NVTAPLGNV

SEQ ID NO: 30287 - protein, 10 aa, Artificial Sequence
  Peptide Derived from Human Papillomavirus
NVTAPLGNVW

SEQ ID NO: 30288 - protein, 8 aa, Artificial Sequence
  Peptide Derived from Human Papillomavirus
NVWETPFY

SEQ ID NO: 30289 - protein, 8 aa, Artificial Sequence
  Peptide Derived from Human Papillomavirus
PIAQAEEI

SEQ ID NO: 30290 - protein, 10 aa, Artificial Sequence
  Peptide Derived from Human Papillomavirus
PIAQAEEIEM

SEQ ID NO: 30291 - protein, 9 aa, Artificial Sequence
  Peptide Derived from Human Papillomavirus
PIKPSTLSF

SEQ ID NO: 30292 - protein, 10 aa, Artificial Sequence
  Peptide Derived from Human Papillomavirus
PIKPSTLSFA

SEQ ID NO: 30293 - protein, 8 aa, Artificial Sequence
  Peptide Derived from Human Papillomavirus
PIPGFRRI

SEQ ID NO: 30294 - protein, 9 aa, Artificial Sequence
  Peptide Derived from Human Papillomavirus
PIPGFRRIA

SEQ ID NO: 30295 - protein, 10 aa, Artificial Sequence
  Peptide Derived from Human Papillomavirus
PIPGFRRIAA

SEQ ID NO: 30296 - protein, 10 aa, Artificial Sequence
  Peptide Derived from Human Papillomavirus
PISSTPIPGF

SEQ ID NO: 30297 - protein, 10 aa, Artificial Sequence
  Peptide Derived from Human Papillomavirus
PLFEGTDTSL

SEQ ID NO: 30298 - protein, 11 aa, Artificial Sequence
  Peptide Derived from Human Papillomavirus
PLFEGTDTSLA

SEQ ID NO: 30299 - protein, 8 aa, Artificial Sequence
  Peptide Derived from Human Papillomavirus
PLFIDPPV

SEQ ID NO: 30300 - protein, 9 aa, Artificial Sequence
  Peptide Derived from Human Papillomavirus
PLFIDPPVI

SEQ ID NO: 30301 - protein, 11 aa, Artificial Sequence
  Peptide Derived from Human Papillomavirus
PLFIDPPVIEA

SEQ ID NO: 30302 - protein, 10 aa, Artificial Sequence
  Peptide Derived from Human Papillomavirus
PLGNVWETPF

SEQ ID NO: 30303 - protein, 11 aa, Artificial Sequence
  Peptide Derived from Human Papillomavirus
PLGNVWETPFY

SEQ ID NO: 30304 - protein, 9 aa, Artificial Sequence
  Peptide Derived from Human Papillomavirus
PLGSRPSTI

SEQ ID NO: 30305 - protein, 10 aa, Artificial Sequence
  Peptide Derived from Human Papillomavirus
PLGSRPSTIV

SEQ ID NO: 30306 - protein, 9 aa, Artificial Sequence
  Peptide Derived from Human Papillomavirus
PLLSANNSF

SEQ ID NO: 30307 - protein, 8 aa, Artificial Sequence
  Peptide Derived from Human Papillomavirus
PPIVVESV

SEQ ID NO: 30308 - protein, 11 aa, Artificial Sequence
  Peptide Derived from Human Papillomavirus
PQSPYDVTHDV

SEQ ID NO: 30309 - protein, 10 aa, Artificial Sequence
  Peptide Derived from Human Papillomavirus
PQTGEVSGNI

SEQ ID NO: 30310 - protein, 11 aa, Artificial Sequence
  Peptide Derived from Human Papillomavirus
PQTGEVSGNIL

SEQ ID NO: 30311 - protein, 11 aa, Artificial Sequence
  Peptide Derived from Human Papillomavirus
PVIEAPQTGEV

SEQ ID NO: 30312 - protein, 8 aa, Artificial Sequence
  Peptide Derived from Human Papillomavirus
QIGARVHY

SEQ ID NO: 30313 - protein, 9 aa, Artificial Sequence
  Peptide Derived from Human Papillomavirus
QIGARVHYY

SEQ ID NO: 30314 - protein, 10 aa, Artificial Sequence
  Peptide Derived from Human Papillomavirus
QIGARVHYYY

SEQ ID NO: 30315 - protein, 8 aa, Artificial Sequence
  Peptide Derived from Human Papillomavirus
QLYKTCKL

SEQ ID NO: 30316 - protein, 10 aa, Artificial Sequence
  Peptide Derived from Human Papillomavirus
QPLLSANNSF

SEQ ID NO: 30317 - protein, 9 aa, Artificial Sequence
  Peptide Derived from Human Papillomavirus
QQVKVTDPA

SEQ ID NO: 30318 - protein, 10 aa, Artificial Sequence
  Peptide Derived from Human Papillomavirus
QQVKVTDPAF

SEQ ID NO: 30319 - protein, 11 aa, Artificial Sequence
  Peptide Derived from Human Papillomavirus
QQVKVTDPAFL

SEQ ID NO: 30320 - protein, 8 aa, Artificial Sequence
  Peptide Derived from Human Papillomavirus
QVKVTDPA

SEQ ID NO: 30321 - protein, 9 aa, Artificial Sequence
  Peptide Derived from Human Papillomavirus
QVKVTDPAF

SEQ ID NO: 30322 - protein, 10 aa, Artificial Sequence
  Peptide Derived from Human Papillomavirus
QVKVTDPAFL

SEQ ID NO: 30323 - protein, 8 aa, Artificial Sequence
  Peptide Derived from Human Papillomavirus
RIAAPRLY

SEQ ID NO: 30324 - protein, 11 aa, Artificial Sequence
  Peptide Derived from Human Papillomavirus
RIAAPRLYRKA

SEQ ID NO: 30325 - protein, 11 aa, Artificial Sequence
  Peptide Derived from Human Papillomavirus
RIPYFFADGDV

SEQ ID NO: 30326 - protein, 8 aa, Artificial Sequence
  Peptide Derived from Human Papillomavirus
RLGRKATI

SEQ ID NO: 30327 - protein, 10 aa, Artificial Sequence
  Peptide Derived from Human Papillomavirus
RLYRKAFQQV

SEQ ID NO: 30328 - protein, 11 aa, Artificial Sequence
  Peptide Derived from Human Papillomavirus
RPAFTTRRGGV

SEQ ID NO: 30329 - protein, 8 aa, Artificial Sequence
  Peptide Derived from Human Papillomavirus
RPATLVSA

SEQ ID NO: 30330 - protein, 9 aa, Artificial Sequence
  Peptide Derived from Human Papillomavirus
RPPIVVESV

SEQ ID NO: 30331 - protein, 8 aa, Artificial Sequence
  Peptide Derived from Human Papillomavirus
RPSTIVDV

SEQ ID NO: 30332 - protein, 11 aa, Artificial Sequence
  Peptide Derived from Human Papillomavirus
RPSTIVDVTPA

SEQ ID NO: 30333 - protein, 8 aa, Artificial Sequence
  Peptide Derived from Human Papillomavirus
RVHYYYDI

SEQ ID NO: 30334 - protein, 11 aa, Artificial Sequence
  Peptide Derived from Human Papillomavirus
RVHYYYDISPI

SEQ ID NO: 30335 - protein, 11 aa, Artificial Sequence
  Peptide Derived from Human Papillomavirus
SIVTLVEESSV

SEQ ID NO: 30336 - protein, 9 aa, Artificial Sequence
  Peptide Derived from Human Papillomavirus
SLAFSPSGV

SEQ ID NO: 30337 - protein, 10 aa, Artificial Sequence
  Peptide Derived from Human Papillomavirus
SLAFSPSGVA

SEQ ID NO: 30338 - protein, 9 aa, Artificial Sequence
  Peptide Derived from Human Papillomavirus
SLFTYFGGL

SEQ ID NO: 30339 - protein, 11 aa, Artificial Sequence
  Peptide Derived from Human Papillomavirus
SLFTYFGGLGI

SEQ ID NO: 30340 - protein, 9 aa, Artificial Sequence
  Peptide Derived from Human Papillomavirus
SPIAQAEEI

SEQ ID NO: 30341 - protein, 11 aa, Artificial Sequence
  Peptide Derived from Human Papillomavirus
SPIAQAEEIEM

SEQ ID NO: 30342 - protein, 11 aa, Artificial Sequence
  Peptide Derived from Human Papillomavirus
SPSGVAPDPDF

SEQ ID NO: 30343 - protein, 9 aa, Artificial Sequence
  Peptide Derived from Human Papillomavirus
SPYDVTHDV

SEQ ID NO: 30344 - protein, 10 aa, Artificial Sequence
  Peptide Derived from Human Papillomavirus
SPYDVTHDVY

SEQ ID NO: 30345 - protein, 11 aa, Artificial Sequence
  Peptide Derived from Human Papillomavirus
SPYDVTHDVYI

SEQ ID NO: 30346 - protein, 9 aa, Artificial Sequence
  Peptide Derived from Human Papillomavirus
SQSVATPSA

SEQ ID NO: 30347 - protein, 11 aa, Artificial Sequence
  Peptide Derived from Human Papillomavirus
SQSVATPSAHL

SEQ ID NO: 30348 - protein, 9 aa, Artificial Sequence
  Peptide Derived from Human Papillomavirus
SVATPSAHL

SEQ ID NO: 30349 - protein, 11 aa, Artificial Sequence
  Peptide Derived from Human Papillomavirus
SVATPSAHLPI

SEQ ID NO: 30350 - protein, 9 aa, Artificial Sequence
  Peptide Derived from Human Papillomavirus
SVGPTDPSI

SEQ ID NO: 30351 - protein, 10 aa, Artificial Sequence
  Peptide Derived from Human Papillomavirus
SVGPTDPSIV

SEQ ID NO: 30352 - protein, 9 aa, Artificial Sequence
  Peptide Derived from Human Papillomavirus
SVIESGAGI

SEQ ID NO: 30353 - protein, 10 aa, Artificial Sequence
  Peptide Derived from Human Papillomavirus
TIQTRRGTQI

SEQ ID NO: 30354 - protein, 8 aa, Artificial Sequence
  Peptide Derived from Human Papillomavirus
TIVDVTPA

SEQ ID NO: 30355 - protein, 11 aa, Artificial Sequence
  Peptide Derived from Human Papillomavirus
TLSFASNTTNV

SEQ ID NO: 30356 - protein, 8 aa, Artificial Sequence
  Peptide Derived from Human Papillomavirus
TLVEESSV

SEQ ID NO: 30357 - protein, 9 aa, Artificial Sequence
  Peptide Derived from Human Papillomavirus
TLVEESSVI

SEQ ID NO: 30358 - protein, 9 aa, Artificial Sequence
  Peptide Derived from Human Papillomavirus
TLVSADNPL

SEQ ID NO: 30359 - protein, 10 aa, Artificial Sequence
  Peptide Derived from Human Papillomavirus
TLVSADNPLF

SEQ ID NO: 30360 - protein, 8 aa, Artificial Sequence
  Peptide Derived from Human Papillomavirus
TPARPPIV

SEQ ID NO: 30361 - protein, 9 aa, Artificial Sequence
  Peptide Derived from Human Papillomavirus
TPARPPIVV

SEQ ID NO: 30362 - protein, 9 aa, Artificial Sequence
  Peptide Derived from Human Papillomavirus
TPFYSGPDI

SEQ ID NO: 30363 - protein, 10 aa, Artificial Sequence
  Peptide Derived from Human Papillomavirus
TPFYSGPDIV

SEQ ID NO: 30364 - protein, 11 aa, Artificial Sequence
  Peptide Derived from Human Papillomavirus
TPFYSGPDIVL

SEQ ID NO: 30365 - protein, 9 aa, Artificial Sequence
  Peptide Derived from Human Papillomavirus
TPIPGFRRI

SEQ ID NO: 30366 - protein, 10 aa, Artificial Sequence
  Peptide Derived from Human Papillomavirus
TPIPGFRRIA

SEQ ID NO: 30367 - protein, 11 aa, Artificial Sequence
  Peptide Derived from Human Papillomavirus
TPIPGFRRIAA

SEQ ID NO: 30368 - protein, 8 aa, Artificial Sequence
  Peptide Derived from Human Papillomavirus
TPSAHLPI

SEQ ID NO: 30369 - protein, 9 aa, Artificial Sequence
  Peptide Derived from Human Papillomavirus
TPTSGIHSY

SEQ ID NO: 30370 - protein, 9 aa, Artificial Sequence
  Peptide Derived from Human Papillomavirus
TPTSSTVHV

SEQ ID NO: 30371 - protein, 9 aa, Artificial Sequence
  Peptide Derived from Human Papillomavirus
TQIGARVHY

SEQ ID NO: 30372 - protein, 10 aa, Artificial Sequence
  Peptide Derived from Human Papillomavirus
TQIGARVHYY

SEQ ID NO: 30373 - protein, 11 aa, Artificial Sequence
  Peptide Derived from Human Papillomavirus
TQIGARVHYYY

SEQ ID NO: 30374 - protein, 9 aa, Artificial Sequence
  Peptide Derived from Human Papillomavirus
TQLYKTCKL

SEQ ID NO: 30375 - protein, 9 aa, Artificial Sequence
  Peptide Derived from Human Papillomavirus
TVHVSSTHI

SEQ ID NO: 30376 - protein, 10 aa, Artificial Sequence
  Peptide Derived from Human Papillomavirus
VIEAPQTGEV

SEQ ID NO: 30377 - protein, 8 aa, Artificial Sequence
  Peptide Derived from Human Papillomavirus
VIESGAGI

SEQ ID NO: 30378 - protein, 11 aa, Artificial Sequence
  Peptide Derived from Human Papillomavirus
VIESGAGIPNF

SEQ ID NO: 30379 - protein, 11 aa, Artificial Sequence
  Peptide Derived from Human Papillomavirus
VLDITPTSSTV

SEQ ID NO: 30380 - protein, 9 aa, Artificial Sequence
  Peptide Derived from Human Papillomavirus
VLPTGPSTW

SEQ ID NO: 30381 - protein, 11 aa, Artificial Sequence
  Peptide Derived from Human Papillomavirus
VLPTGPSTWPF

SEQ ID NO: 30382 - protein, 10 aa, Artificial Sequence
  Peptide Derived from Human Papillomavirus
VPLGSRPSTI

SEQ ID NO: 30383 - protein, 11 aa, Artificial Sequence
  Peptide Derived from Human Papillomavirus
VPLGSRPSTIV

SEQ ID NO: 30384 - protein, 8 aa, Artificial Sequence
  Peptide Derived from Human Papillomavirus
VPQSPYDV

SEQ ID NO: 30385 - protein, 10 aa, Artificial Sequence
  Peptide Derived from Human Papillomavirus
VVNKIEQKTW

SEQ ID NO: 30386 - protein, 11 aa, Artificial Sequence
  Peptide Derived from Human Papillomavirus
VVNKIEQKTWA

SEQ ID NO: 30387 - protein, 9 aa, Artificial Sequence
  Peptide Derived from Human Papillomavirus
WPFVPQSPY

SEQ ID NO: 30388 - protein, 11 aa, Artificial Sequence
  Peptide Derived from Human Papillomavirus
WPFVPQSPYDV

SEQ ID NO: 30389 - protein, 8 aa, Artificial Sequence
  Peptide Derived from Human Papillomavirus
YIQGSSFA

SEQ ID NO: 30390 - protein, 9 aa, Artificial Sequence
  Peptide Derived from Human Papillomavirus
YIQGSSFAL

SEQ ID NO: 30391 - protein, 10 aa, Artificial Sequence
  Peptide Derived from Human Papillomavirus
YIQGSSFALW

SEQ ID NO: 30392 - protein, 11 aa, Artificial Sequence
  Peptide Derived from Human Papillomavirus
YVPLGSRPSTI

SEQ ID NO: 30393 - protein, 11 aa, Artificial Sequence
  Peptide Derived from Human Papillomavirus
ADSIKTLLQQY

SEQ ID NO: 30394 - protein, 10 aa, Artificial Sequence
  Peptide Derived from Human Papillomavirus
AMLAKFKELY

SEQ ID NO: 30395 - protein, 8 aa, Artificial Sequence
  Peptide Derived from Human Papillomavirus
ATVPCWNY

SEQ ID NO: 30396 - protein, 9 aa, Artificial Sequence
  Peptide Derived from Human Papillomavirus
DCATMCRHY

SEQ ID NO: 30397 - protein, 10 aa, Artificial Sequence
  Peptide Derived from Human Papillomavirus
DDATVPCWNY

SEQ ID NO: 30398 - protein, 9 aa, Artificial Sequence
  Peptide Derived from Human Papillomavirus
DDSEIAYKY

SEQ ID NO: 30399 - protein, 8 aa, Artificial Sequence
  Peptide Derived from Human Papillomavirus
DSEIAYKY

SEQ ID NO: 30400 - protein, 10 aa, Artificial Sequence
  Peptide Derived from Human Papillomavirus
DSIKTLLQQY

SEQ ID NO: 30401 - protein, 10 aa, Artificial Sequence
  Peptide Derived from Human Papillomavirus
ELSQMVQWAY

SEQ ID NO: 30402 - protein, 9 aa, Artificial Sequence
  Peptide Derived from Human Papillomavirus
ETETPCSQY

SEQ ID NO: 30403 - protein, 9 aa, Artificial Sequence
  Peptide Derived from Human Papillomavirus
FDENGNPVY

SEQ ID NO: 30404 - protein, 8 aa, Artificial Sequence
  Peptide Derived from Human Papillomavirus
FESEDSGY

SEQ ID NO: 30405 - protein, 10 aa, Artificial Sequence
  Peptide Derived from Human Papillomavirus
GGSGGGCSQY

SEQ ID NO: 30406 - protein, 9 aa, Artificial Sequence
  Peptide Derived from Human Papillomavirus
GISNISEVY

SEQ ID NO: 30407 - protein, 10 aa, Artificial Sequence
  Peptide Derived from Human Papillomavirus
GMVVLLLVRY

SEQ ID NO: 30408 - protein, 9 aa, Artificial Sequence
  Peptide Derived from Human Papillomavirus
GSGGGCSQY

SEQ ID NO: 30409 - protein, 8 aa, Artificial Sequence
  Peptide Derived from Human Papillomavirus
GTDSRWPY

SEQ ID NO: 30410 - protein, 9 aa, Artificial Sequence
  Peptide Derived from Human Papillomavirus
GTGCNGWFY

SEQ ID NO: 30411 - protein, 11 aa, Artificial Sequence
  Peptide Derived from Human Papillomavirus
INAGTDSRWPY

SEQ ID NO: 30412 - protein, 8 aa, Artificial Sequence
  Peptide Derived from Human Papillomavirus
ISNISEVY

SEQ ID NO: 30413 - protein, 9 aa, Artificial Sequence
  Peptide Derived from Human Papillomavirus
IVDDSEIAY

SEQ ID NO: 30414 - protein, 11 aa, Artificial Sequence
  Peptide Derived from Human Papillomavirus
IVDDSEIAYKY

SEQ ID NO: 30415 - protein, 11 aa, Artificial Sequence
  Peptide Derived from Human Papillomavirus
KTGISNISEVY

SEQ ID NO: 30416 - protein, 10 aa, Artificial Sequence
  Peptide Derived from Human Papillomavirus
KTLLQQYCLY

SEQ ID NO: 30417 - protein, 11 aa, Artificial Sequence
  Peptide Derived from Human Papillomavirus
LDDATVPCWNY

SEQ ID NO: 30418 - protein, 9 aa, Artificial Sequence
  Peptide Derived from Human Papillomavirus
LFESEDSGY

SEQ ID NO: 30419 - protein, 9 aa, Artificial Sequence
  Peptide Derived from Human Papillomavirus
LRSTAAALY

SEQ ID NO: 30420 - protein, 11 aa, Artificial Sequence
  Peptide Derived from Human Papillomavirus
LRSTAAALYWY

SEQ ID NO: 30421 - protein, 9 aa, Artificial Sequence
  Peptide Derived from Human Papillomavirus
LSQMVQWAY

SEQ ID NO: 30422 - protein, 11 aa, Artificial Sequence
  Peptide Derived from Human Papillomavirus
LVDFIVNDNDY

SEQ ID NO: 30423 - protein, 9 aa, Artificial Sequence
  Peptide Derived from Human Papillomavirus
MLAKFKELY

SEQ ID NO: 30424 - protein, 9 aa, Artificial Sequence
  Peptide Derived from Human Papillomavirus
MSMSQWIKY

SEQ ID NO: 30425 - protein, 10 aa, Artificial Sequence
  Peptide Derived from Human Papillomavirus
PFDENGNPVY

SEQ ID NO: 30426 - protein, 10 aa, Artificial Sequence
  Peptide Derived from Human Papillomavirus
QMSMSQWIKY

SEQ ID NO: 30427 - protein, 11 aa, Artificial Sequence
  Peptide Derived from Human Papillomavirus
RDAVQVLKRKY

SEQ ID NO: 30428 - protein, 11 aa, Artificial Sequence
  Peptide Derived from Human Papillomavirus
RHETETPCSQY

SEQ ID NO: 30429 - protein, 8 aa, Artificial Sequence
  Peptide Derived from Human Papillomavirus
RSTAAALY

SEQ ID NO: 30430 - protein, 10 aa, Artificial Sequence
  Peptide Derived from Human Papillomavirus
RSTAAALYWY

SEQ ID NO: 30431 - protein, 8 aa, Artificial Sequence
  Peptide Derived from Human Papillomavirus
SMSQWIKY

SEQ ID NO: 30432 - protein, 9 aa, Artificial Sequence
  Peptide Derived from Human Papillomavirus
STAAALYWY

SEQ ID NO: 30433 - protein, 8 aa, Artificial Sequence
  Peptide Derived from Human Papillomavirus
TAAALYWY

SEQ ID NO: 30434 - protein, 8 aa, Artificial Sequence
  Peptide Derived from Human Papillomavirus
VDDSEIAY

SEQ ID NO: 30435 - protein, 10 aa, Artificial Sequence
  Peptide Derived from Human Papillomavirus
VDDSEIAYKY

SEQ ID NO: 30436 - protein, 11 aa, Artificial Sequence
  Peptide Derived from Human Papillomavirus
VKDCATMCRHY

SEQ ID NO: 30437 - protein, 9 aa, Artificial Sequence
  Peptide Derived from Human Papillomavirus
CQDKILTHY

SEQ ID NO: 30438 - protein, 10 aa, Artificial Sequence
  Peptide Derived from Human Papillomavirus
DGDICNTMHY

SEQ ID NO: 30439 - protein, 11 aa, Artificial Sequence
  Peptide Derived from Human Papillomavirus
DSTDLRDHIDY

SEQ ID NO: 30440 - protein, 8 aa, Artificial Sequence
  Peptide Derived from Human Papillomavirus
ETIYNSQY

SEQ ID NO: 30441 - protein, 8 aa, Artificial Sequence
  Peptide Derived from Human Papillomavirus
FKDDAEKY

SEQ ID NO: 30442 - protein, 11 aa, Artificial Sequence
  Peptide Derived from Human Papillomavirus
GDANTLKCLRY

SEQ ID NO: 30443 - protein, 10 aa, Artificial Sequence
  Peptide Derived from Human Papillomavirus
HKSAIVTLTY

SEQ ID NO: 30444 - protein, 9 aa, Artificial Sequence
  Peptide Derived from Human Papillomavirus
HMRLECAIY

SEQ ID NO: 30445 - protein, 10 aa, Artificial Sequence
  Peptide Derived from Human Papillomavirus
HMRLECAIYY

SEQ ID NO: 30446 - protein, 9 aa, Artificial Sequence
  Peptide Derived from Human Papillomavirus
KSAIVTLTY

SEQ ID NO: 30447 - protein, 9 aa, Artificial Sequence
  Peptide Derived from Human Papillomavirus
LQDVSLEVY

SEQ ID NO: 30448 - protein, 11 aa, Artificial Sequence
  Peptide Derived from Human Papillomavirus
LTLETIYNSQY

SEQ ID NO: 30449 - protein, 8 aa, Artificial Sequence
  Peptide Derived from Human Papillomavirus
NTLKCLRY

SEQ ID NO: 30450 - protein, 10 aa, Artificial Sequence
  Peptide Derived from Human Papillomavirus
PTGCIKKHGY

SEQ ID NO: 30451 - protein, 8 aa, Artificial Sequence
  Peptide Derived from Human Papillomavirus
QVDYYGLY

SEQ ID NO: 30452 - protein, 9 aa, Artificial Sequence
  Peptide Derived from Human Papillomavirus
QVDYYGLYY

SEQ ID NO: 30453 - protein, 8 aa, Artificial Sequence
  Peptide Derived from Human Papillomavirus
RLECAIYY

SEQ ID NO: 30454 - protein, 10 aa, Artificial Sequence
  Peptide Derived from Human Papillomavirus
STDLRDHIDY

SEQ ID NO: 30455 - protein, 10 aa, Artificial Sequence
  Peptide Derived from Human Papillomavirus
TLETIYNSQY

SEQ ID NO: 30456 - protein, 11 aa, Artificial Sequence
  Peptide Derived from Human Papillomavirus
TMHYTNWTHIY

SEQ ID NO: 30457 - protein, 8 aa, Artificial Sequence
  Peptide Derived from Human Papillomavirus
VHEGIRTY

SEQ ID NO: 30458 - protein, 10 aa, Artificial Sequence
  Peptide Derived from Human Papillomavirus
VTVVEGQVDY

SEQ ID NO: 30459 - protein, 11 aa, Artificial Sequence
  Peptide Derived from Human Papillomavirus
VTVVEGQVDYY

SEQ ID NO: 30460 - protein, 8 aa, Artificial Sequence
  Peptide Derived from Human Papillomavirus
VVEGQVDY

SEQ ID NO: 30461 - protein, 9 aa, Artificial Sequence
  Peptide Derived from Human Papillomavirus
VVEGQVDYY

SEQ ID NO: 30462 - protein, 11 aa, Artificial Sequence
  Peptide Derived from Human Papillomavirus
WTLQDVSLEVY

SEQ ID NO: 30463 - protein, 8 aa, Artificial Sequence
  Peptide Derived from Human Papillomavirus
YTNWTHIY

SEQ ID NO: 30464 - protein, 11 aa, Artificial Sequence
  Peptide Derived from Human Papillomavirus
AASAFRCFIVY

SEQ ID NO: 30465 - protein, 10 aa, Artificial Sequence
  Peptide Derived from Human Papillomavirus
ASAFRCFIVY

SEQ ID NO: 30466 - protein, 11 aa, Artificial Sequence
  Peptide Derived from Human Papillomavirus
DFAFRDLCIVY

SEQ ID NO: 30467 - protein, 8 aa, Artificial Sequence
  Peptide Derived from Human Papillomavirus
FRDLCIVY

SEQ ID NO: 30468 - protein, 8 aa, Artificial Sequence
  Peptide Derived from Human Papillomavirus
FYSKISEY

SEQ ID NO: 30469 - protein, 11 aa, Artificial Sequence
  Peptide Derived from Human Papillomavirus
FYSKISEYRHY

SEQ ID NO: 30470 - protein, 8 aa, Artificial Sequence
  Peptide Derived from Human Papillomavirus
GTTLEQQY

SEQ ID NO: 30471 - protein, 10 aa, Artificial Sequence
  Peptide Derived from Human Papillomavirus
IHDIILECVY

SEQ ID NO: 30472 - protein, 9 aa, Artificial Sequence
  Peptide Derived from Human Papillomavirus
ISEYRHYCY

SEQ ID NO: 30473 - protein, 8 aa, Artificial Sequence
  Peptide Derived from Human Papillomavirus
KISEYRHY

SEQ ID NO: 30474 - protein, 10 aa, Artificial Sequence
  Peptide Derived from Human Papillomavirus
KISEYRHYCY

SEQ ID NO: 30475 - protein, 9 aa, Artificial Sequence
  Peptide Derived from Human Papillomavirus
VCDKCLKFY

SEQ ID NO: 30476 - protein, 10 aa, Artificial Sequence
  Peptide Derived from Human Papillomavirus
YSKISEYRHY

SEQ ID NO: 30477 - protein, 8 aa, Artificial Sequence
  Peptide Derived from Human Papillomavirus
DTPTLHEY

SEQ ID NO: 30478 - protein, 8 aa, Artificial Sequence
  Peptide Derived from Human Papillomavirus
ETTDLYCY

SEQ ID NO: 30479 - protein, 10 aa, Artificial Sequence
  Peptide Derived from Human Papillomavirus
GQAEPDRAHY

SEQ ID NO: 30480 - protein, 10 aa, Artificial Sequence
  Peptide Derived from Human Papillomavirus
HGDTPTLHEY

SEQ ID NO: 30481 - protein, 9 aa, Artificial Sequence
  Peptide Derived from Human Papillomavirus
QAEPDRAHY

SEQ ID NO: 30482 - protein, 8 aa, Artificial Sequence
  Peptide Derived from Human Papillomavirus
QPETTDLY

SEQ ID NO: 30483 - protein, 10 aa, Artificial Sequence
  Peptide Derived from Human Papillomavirus
QPETTDLYCY

SEQ ID NO: 30484 - protein, 9 aa, Artificial Sequence
  Peptide Derived from Human Papillomavirus
AISTSETTY

SEQ ID NO: 30485 - protein, 11 aa, Artificial Sequence
  Peptide Derived from Human Papillomavirus
CAAISTSETTY

SEQ ID NO: 30486 - protein, 10 aa, Artificial Sequence
  Peptide Derived from Human Papillomavirus
CTSICKYPDY

SEQ ID NO: 30487 - protein, 9 aa, Artificial Sequence
  Peptide Derived from Human Papillomavirus
CYENDVNVY

SEQ ID NO: 30488 - protein, 8 aa, Artificial Sequence
  Peptide Derived from Human Papillomavirus
DTENASAY

SEQ ID NO: 30489 - protein, 11 aa, Artificial Sequence
  Peptide Derived from Human Papillomavirus
FKEYLRHGEEY

SEQ ID NO: 30490 - protein, 11 aa, Artificial Sequence
  Peptide Derived from Human Papillomavirus
GSTANLASSNY

SEQ ID NO: 30491 - protein, 8 aa, Artificial Sequence
  Peptide Derived from Human Papillomavirus
ISTSETTY

SEQ ID NO: 30492 - protein, 11 aa, Artificial Sequence
  Peptide Derived from Human Papillomavirus
ITCYENDVNVY

SEQ ID NO: 30493 - protein, 10 aa, Artificial Sequence
  Peptide Derived from Human Papillomavirus
ITLTADVMTY

SEQ ID NO: 30494 - protein, 8 aa, Artificial Sequence
  Peptide Derived from Human Papillomavirus
KEDPLKKY

SEQ ID NO: 30495 - protein, 11 aa, Artificial Sequence
  Peptide Derived from Human Papillomavirus
KLDDTENASAY

SEQ ID NO: 30496 - protein, 10 aa, Artificial Sequence
  Peptide Derived from Human Papillomavirus
LDDTENASAY

SEQ ID NO: 30497 - protein, 8 aa, Artificial Sequence
  Peptide Derived from Human Papillomavirus
LLAVGHPY

SEQ ID NO: 30498 - protein, 8 aa, Artificial Sequence
  Peptide Derived from Human Papillomavirus
LPSEATVY

SEQ ID NO: 30499 - protein, 8 aa, Artificial Sequence
  Peptide Derived from Human Papillomavirus
LTADVMTY

SEQ ID NO: 30500 - protein, 9 aa, Artificial Sequence
  Peptide Derived from Human Papillomavirus
NRECISMDY

SEQ ID NO: 30501 - protein, 9 aa, Artificial Sequence
  Peptide Derived from Human Papillomavirus
PKEDPLKKY

SEQ ID NO: 30502 - protein, 11 aa, Artificial Sequence
  Peptide Derived from Human Papillomavirus
PLDICTSICKY

SEQ ID NO: 30503 - protein, 11 aa, Artificial Sequence
  Peptide Derived from Human Papillomavirus
PVSKVVSTDEY

SEQ ID NO: 30504 - protein, 10 aa, Artificial Sequence
  Peptide Derived from Human Papillomavirus
SDAQIFNKPY

SEQ ID NO: 30505 - protein, 10 aa, Artificial Sequence
  Peptide Derived from Human Papillomavirus
STANLASSNY

SEQ ID NO: 30506 - protein, 11 aa, Artificial Sequence
  Peptide Derived from Human Papillomavirus
TDEYVARTNIY

SEQ ID NO: 30507 - protein, 11 aa, Artificial Sequence
  Peptide Derived from Human Papillomavirus
TSDAQIFNKPY

SEQ ID NO: 30508 - protein, 9 aa, Artificial Sequence
  Peptide Derived from Human Papillomavirus
TSICKYPDY

SEQ ID NO: 30509 - protein, 11 aa, Artificial Sequence
  Peptide Derived from Human Papillomavirus
TSRLLAVGHPY

SEQ ID NO: 30510 - protein, 11 aa, Artificial Sequence
  Peptide Derived from Human Papillomavirus
TTYKNTNFKEY

SEQ ID NO: 30511 - protein, 10 aa, Artificial Sequence
  Peptide Derived from Human Papillomavirus
VGENVPDDLY

SEQ ID NO: 30512 - protein, 10 aa, Artificial Sequence
  Peptide Derived from Human Papillomavirus
VSKVVSTDEY

SEQ ID NO: 30513 - protein, 8 aa, Artificial Sequence
  Peptide Derived from Human Papillomavirus
YGDSLFFY

SEQ ID NO: 30514 - protein, 8 aa, Artificial Sequence
  Peptide Derived from Human Papillomavirus
YVARTNIY

SEQ ID NO: 30515 - protein, 9 aa, Artificial Sequence
  Peptide Derived from Human Papillomavirus
YVARTNIYY

SEQ ID NO: 30516 - protein, 10 aa, Artificial Sequence
  Peptide Derived from Human Papillomavirus
AGDFYLHPSY

SEQ ID NO: 30517 - protein, 11 aa, Artificial Sequence
  Peptide Derived from Human Papillomavirus
AGDFYLHPSYY

SEQ ID NO: 30518 - protein, 9 aa, Artificial Sequence
  Peptide Derived from Human Papillomavirus
GIDVDNTLY

SEQ ID NO: 30519 - protein, 10 aa, Artificial Sequence
  Peptide Derived from Human Papillomavirus
GKSIGAKVHY

SEQ ID NO: 30520 - protein, 11 aa, Artificial Sequence
  Peptide Derived from Human Papillomavirus
GKSIGAKVHYY

SEQ ID NO: 30521 - protein, 10 aa, Artificial Sequence
  Peptide Derived from Human Papillomavirus
GSGTGGRTGY

SEQ ID NO: 30522 - protein, 11 aa, Artificial Sequence
  Peptide Derived from Human Papillomavirus
GSRPVARLGLY

SEQ ID NO: 30523 - protein, 8 aa, Artificial Sequence
  Peptide Derived from Human Papillomavirus
GTGGRTGY

SEQ ID NO: 30524 - protein, 8 aa, Artificial Sequence
  Peptide Derived from Human Papillomavirus
IADAGDFY

SEQ ID NO: 30525 - protein, 8 aa, Artificial Sequence
  Peptide Derived from Human Papillomavirus
IADQILQY

SEQ ID NO: 30526 - protein, 8 aa, Artificial Sequence
  Peptide Derived from Human Papillomavirus
IGAKVHYY

SEQ ID NO: 30527 - protein, 9 aa, Artificial Sequence
  Peptide Derived from Human Papillomavirus
IGAKVHYYY

SEQ ID NO: 30528 - protein, 9 aa, Artificial Sequence
  Peptide Derived from Human Papillomavirus
IIADAGDFY

SEQ ID NO: 30529 - protein, 10 aa, Artificial Sequence
  Peptide Derived from Human Papillomavirus
ITTPTKLITY

SEQ ID NO: 30530 - protein, 8 aa, Artificial Sequence
  Peptide Derived from Human Papillomavirus
ITYDNPAY

SEQ ID NO: 30531 - protein, 9 aa, Artificial Sequence
  Peptide Derived from Human Papillomavirus
KRASATQLY

SEQ ID NO: 30532 - protein, 9 aa, Artificial Sequence
  Peptide Derived from Human Papillomavirus
KSIGAKVHY

SEQ ID NO: 30533 - protein, 10 aa, Artificial Sequence
  Peptide Derived from Human Papillomavirus
KSIGAKVHYY

SEQ ID NO: 30534 - protein, 11 aa, Artificial Sequence
  Peptide Derived from Human Papillomavirus
KSIGAKVHYYY

SEQ ID NO: 30535 - protein, 10 aa, Artificial Sequence
  Peptide Derived from Human Papillomavirus
KTIADQILQY

SEQ ID NO: 30536 - protein, 11 aa, Artificial Sequence
  Peptide Derived from Human Papillomavirus
LSSSTISTHNY

SEQ ID NO: 30537 - protein, 10 aa, Artificial Sequence
  Peptide Derived from Human Papillomavirus
LTSRRTGIRY

SEQ ID NO: 30538 - protein, 10 aa, Artificial Sequence
  Peptide Derived from Human Papillomavirus
NTTIPFGGAY

SEQ ID NO: 30539 - protein, 8 aa, Artificial Sequence
  Peptide Derived from Human Papillomavirus
PSTSLSGY

SEQ ID NO: 30540 - protein, 11 aa, Artificial Sequence
  Peptide Derived from Human Papillomavirus
PSVPSTSLSGY

SEQ ID NO: 30541 - protein, 9 aa, Artificial Sequence
  Peptide Derived from Human Papillomavirus
PTSINNGLY

SEQ ID NO: 30542 - protein, 8 aa, Artificial Sequence
  Peptide Derived from Human Papillomavirus
PVARLGLY

SEQ ID NO: 30543 - protein, 8 aa, Artificial Sequence
  Peptide Derived from Human Papillomavirus
QTITPSTY

SEQ ID NO: 30544 - protein, 8 aa, Artificial Sequence
  Peptide Derived from Human Papillomavirus
RASATQLY

SEQ ID NO: 30545 - protein, 11 aa, Artificial Sequence
  Peptide Derived from Human Papillomavirus
RTKRASATQLY

SEQ ID NO: 30546 - protein, 10 aa, Artificial Sequence
  Peptide Derived from Human Papillomavirus
SSSTISTHNY

SEQ ID NO: 30547 - protein, 9 aa, Artificial Sequence
  Peptide Derived from Human Papillomavirus
SSTISTHNY

SEQ ID NO: 30548 - protein, 8 aa, Artificial Sequence
  Peptide Derived from Human Papillomavirus
STISTHNY

SEQ ID NO: 30549 - protein, 11 aa, Artificial Sequence
  Peptide Derived from Human Papillomavirus
TGSGTGGRTGY

SEQ ID NO: 30550 - protein, 9 aa, Artificial Sequence
  Peptide Derived from Human Papillomavirus
TIADQILQY

SEQ ID NO: 30551 - protein, 8 aa, Artificial Sequence
  Peptide Derived from Human Papillomavirus
TSINNGLY

SEQ ID NO: 30552 - protein, 11 aa, Artificial Sequence
  Peptide Derived from Human Papillomavirus
TSINNGLYDIY

SEQ ID NO: 30553 - protein, 9 aa, Artificial Sequence
  Peptide Derived from Human Papillomavirus
TSRRTGIRY

SEQ ID NO: 30554 - protein, 9 aa, Artificial Sequence
  Peptide Derived from Human Papillomavirus
TTIPFGGAY

SEQ ID NO: 30555 - protein, 9 aa, Artificial Sequence
  Peptide Derived from Human Papillomavirus
TTPTKLITY

SEQ ID NO: 30556 - protein, 9 aa, Artificial Sequence
  Peptide Derived from Human Papillomavirus
VPSTSLSGY

SEQ ID NO: 30557 - protein, 11 aa, Artificial Sequence
  Peptide Derived from Human Papillomavirus
YTIIADAGDFY

SEQ ID NO: 30558 - protein, 8 aa, Artificial Sequence
  Peptide Derived from Human Papillomavirus
AKDNRWPY

SEQ ID NO: 30559 - protein, 10 aa, Artificial Sequence
  Peptide Derived from Human Papillomavirus
AMLAVFKDTY

SEQ ID NO: 30560 - protein, 8 aa, Artificial Sequence
  Peptide Derived from Human Papillomavirus
ATTTCWTY

SEQ ID NO: 30561 - protein, 9 aa, Artificial Sequence
  Peptide Derived from Human Papillomavirus
DCATMCKHY

SEQ ID NO: 30562 - protein, 10 aa, Artificial Sequence
  Peptide Derived from Human Papillomavirus
DDATTTCWTY

SEQ ID NO: 30563 - protein, 9 aa, Artificial Sequence
  Peptide Derived from Human Papillomavirus
DESDMAFEY

SEQ ID NO: 30564 - protein, 8 aa, Artificial Sequence
  Peptide Derived from Human Papillomavirus
ESDMAFEY

SEQ ID NO: 30565 - protein, 8 aa, Artificial Sequence
  Peptide Derived from Human Papillomavirus
FTISDSGY

SEQ ID NO: 30566 - protein, 9 aa, Artificial Sequence
  Peptide Derived from Human Papillomavirus
GPANTGKSY

SEQ ID NO: 30567 - protein, 9 aa, Artificial Sequence
  Peptide Derived from Human Papillomavirus
GTGCNGWFY

SEQ ID NO: 30568 - protein, 10 aa, Artificial Sequence
  Peptide Derived from Human Papillomavirus
HPAKDNRWPY

SEQ ID NO: 30569 - protein, 8 aa, Artificial Sequence
  Peptide Derived from Human Papillomavirus
KSNCQAKY

SEQ ID NO: 30570 - protein, 10 aa, Artificial Sequence
  Peptide Derived from Human Papillomavirus
KTLIQPFILY

SEQ ID NO: 30571 - protein, 11 aa, Artificial Sequence
  Peptide Derived from Human Papillomavirus
LDDATTTCWTY

SEQ ID NO: 30572 - protein, 11 aa, Artificial Sequence
  Peptide Derived from Human Papillomavirus
LKDCATMCKHY

SEQ ID NO: 30573 - protein, 9 aa, Artificial Sequence
  Peptide Derived from Human Papillomavirus
LKSNCQAKY

SEQ ID NO: 30574 - protein, 9 aa, Artificial Sequence
  Peptide Derived from Human Papillomavirus
LRSSVAALY

SEQ ID NO: 30575 - protein, 11 aa, Artificial Sequence
  Peptide Derived from Human Papillomavirus
LRSSVAALYWY

SEQ ID NO: 30576 - protein, 11 aa, Artificial Sequence
  Peptide Derived from Human Papillomavirus
LTDESDMAFEY

SEQ ID NO: 30577 - protein, 9 aa, Artificial Sequence
  Peptide Derived from Human Papillomavirus
MLAVFKDTY

SEQ ID NO: 30578 - protein, 10 aa, Artificial Sequence
  Peptide Derived from Human Papillomavirus
PFDKNGNPVY

SEQ ID NO: 30579 - protein, 8 aa, Artificial Sequence
  Peptide Derived from Human Papillomavirus
RSSVAALY

SEQ ID NO: 30580 - protein, 10 aa, Artificial Sequence
  Peptide Derived from Human Papillomavirus
RSSVAALYWY

SEQ ID NO: 30581 - protein, 9 aa, Artificial Sequence
  Peptide Derived from Human Papillomavirus
SSVAALYWY

SEQ ID NO: 30582 - protein, 8 aa, Artificial Sequence
  Peptide Derived from Human Papillomavirus
SVAALYWY

SEQ ID NO: 30583 - protein, 10 aa, Artificial Sequence
  Peptide Derived from Human Papillomavirus
TDESDMAFEY

SEQ ID NO: 30584 - protein, 10 aa, Artificial Sequence
  Peptide Derived from Human Papillomavirus
TTCWTYFDTY

SEQ ID NO: 30585 - protein, 11 aa, Artificial Sequence
  Peptide Derived from Human Papillomavirus
TTTCWTYFDTY

SEQ ID NO: 30586 - protein, 10 aa, Artificial Sequence
  Peptide Derived from Human Papillomavirus
ATCVSHRGLY

SEQ ID NO: 30587 - protein, 11 aa, Artificial Sequence
  Peptide Derived from Human Papillomavirus
ATCVSHRGLYY

SEQ ID NO: 30588 - protein, 11 aa, Artificial Sequence
  Peptide Derived from Human Papillomavirus
CMTYVAWDSVY

SEQ ID NO: 30589 - protein, 8 aa, Artificial Sequence
  Peptide Derived from Human Papillomavirus
CVSHRGLY

SEQ ID NO: 30590 - protein, 9 aa, Artificial Sequence
  Peptide Derived from Human Papillomavirus
CVSHRGLYY

SEQ ID NO: 30591 - protein, 8 aa, Artificial Sequence
  Peptide Derived from Human Papillomavirus
DIDSQIQY

SEQ ID NO: 30592 - protein, 11 aa, Artificial Sequence
  Peptide Derived from Human Papillomavirus
DSKDIDSQIQY

SEQ ID NO: 30593 - protein, 9 aa, Artificial Sequence
  Peptide Derived from Human Papillomavirus
DSVQILVGY

SEQ ID NO: 30594 - protein, 8 aa, Artificial Sequence
  Peptide Derived from Human Papillomavirus
FKSECEKY

SEQ ID NO: 30595 - protein, 11 aa, Artificial Sequence
  Peptide Derived from Human Papillomavirus
IPDSVQILVGY

SEQ ID NO: 30596 - protein, 9 aa, Artificial Sequence
  Peptide Derived from Human Papillomavirus
KTGILTVTY

SEQ ID NO: 30597 - protein, 10 aa, Artificial Sequence
  Peptide Derived from Human Papillomavirus
MTYVAWDSVY

SEQ ID NO: 30598 - protein, 11 aa, Artificial Sequence
  Peptide Derived from Human Papillomavirus
MTYVAWDSVYY

SEQ ID NO: 30599 - protein, 8 aa, Artificial Sequence
  Peptide Derived from Human Papillomavirus
NKDNCMTY

SEQ ID NO: 30600 - protein, 8 aa, Artificial Sequence
  Peptide Derived from Human Papillomavirus
NSLKCLRY

SEQ ID NO: 30601 - protein, 10 aa, Artificial Sequence
  Peptide Derived from Human Papillomavirus
PDSVQILVGY

SEQ ID NO: 30602 - protein, 11 aa, Artificial Sequence
  Peptide Derived from Human Papillomavirus
QTLNHQVVPAY

SEQ ID NO: 30603 - protein, 9 aa, Artificial Sequence
  Peptide Derived from Human Papillomavirus
RNSLKCLRY

SEQ ID NO: 30604 - protein, 10 aa, Artificial Sequence
  Peptide Derived from Human Papillomavirus
SKDIDSQIQY

SEQ ID NO: 30605 - protein, 11 aa, Artificial Sequence
  Peptide Derived from Human Papillomavirus
STVSVGTAKTY

SEQ ID NO: 30606 - protein, 10 aa, Artificial Sequence
  Peptide Derived from Human Papillomavirus
TVSVGTAKTY

SEQ ID NO: 30607 - protein, 9 aa, Artificial Sequence
  Peptide Derived from Human Papillomavirus
VKEGYNTFY

SEQ ID NO: 30608 - protein, 9 aa, Artificial Sequence
  Peptide Derived from Human Papillomavirus
VQDKIIDHY

SEQ ID NO: 30609 - protein, 8 aa, Artificial Sequence
  Peptide Derived from Human Papillomavirus
VSHRGLYY

SEQ ID NO: 30610 - protein, 9 aa, Artificial Sequence
  Peptide Derived from Human Papillomavirus
VSVGTAKTY

SEQ ID NO: 30611 - protein, 11 aa, Artificial Sequence
  Peptide Derived from Human Papillomavirus
YIEFKSECEKY

SEQ ID NO: 30612 - protein, 8 aa, Artificial Sequence
  Peptide Derived from Human Papillomavirus
YVAWDSVY

SEQ ID NO: 30613 - protein, 9 aa, Artificial Sequence
  Peptide Derived from Human Papillomavirus
YVAWDSVYY

SEQ ID NO: 30614 - protein, 10 aa, Artificial Sequence
  Peptide Derived from Human Papillomavirus
AYAWVLVFVY

SEQ ID NO: 30615 - protein, 11 aa, Artificial Sequence
  Peptide Derived from Human Papillomavirus
ITSPATAFTVY

SEQ ID NO: 30616 - protein, 9 aa, Artificial Sequence
  Peptide Derived from Human Papillomavirus
LPSVCMCAY

SEQ ID NO: 30617 - protein, 8 aa, Artificial Sequence
  Peptide Derived from Human Papillomavirus
PSVCMCAY

SEQ ID NO: 30618 - protein, 9 aa, Artificial Sequence
  Peptide Derived from Human Papillomavirus
SPATAFTVY

SEQ ID NO: 30619 - protein, 10 aa, Artificial Sequence
  Peptide Derived from Human Papillomavirus
TSPATAFTVY

SEQ ID NO: 30620 - protein, 8 aa, Artificial Sequence
  Peptide Derived from Human Papillomavirus
DIEITCVY

SEQ ID NO: 30621 - protein, 11 aa, Artificial Sequence
  Peptide Derived from Human Papillomavirus
EFAFKDLFVVY

SEQ ID NO: 30622 - protein, 9 aa, Artificial Sequence
  Peptide Derived from Human Papillomavirus
FEDPTRRPY

SEQ ID NO: 30623 - protein, 8 aa, Artificial Sequence
  Peptide Derived from Human Papillomavirus
FKDLFVVY

SEQ ID NO: 30624 - protein, 11 aa, Artificial Sequence
  Peptide Derived from Human Papillomavirus
FYSRIRELRHY

SEQ ID NO: 30625 - protein, 11 aa, Artificial Sequence
  Peptide Derived from Human Papillomavirus
HAACHKCIDFY

SEQ ID NO: 30626 - protein, 10 aa, Artificial Sequence
  Peptide Derived from Human Papillomavirus
LQDIEITCVY

SEQ ID NO: 30627 - protein, 10 aa, Artificial Sequence
  Peptide Derived from Human Papillomavirus
RFEDPTRRPY

SEQ ID NO: 30628 - protein, 11 aa, Artificial Sequence
  Peptide Derived from Human Papillomavirus
TLEKLTNTGLY

SEQ ID NO: 30629 - protein, 10 aa, Artificial Sequence
  Peptide Derived from Human Papillomavirus
YSRIRELRHY

SEQ ID NO: 30630 - protein, 9 aa, Artificial Sequence
  Peptide Derived from Human Papillomavirus
APAENKDPY

SEQ ID NO: 30631 - protein, 8 aa, Artificial Sequence
  Peptide Derived from Human Papillomavirus
ASPGSCVY

SEQ ID NO: 30632 - protein, 11 aa, Artificial Sequence
  Peptide Derived from Human Papillomavirus
ASTQSPVPGQY

SEQ ID NO: 30633 - protein, 10 aa, Artificial Sequence
  Peptide Derived from Human Papillomavirus
CQSICKYPDY

SEQ ID NO: 30634 - protein, 11 aa, Artificial Sequence
  Peptide Derived from Human Papillomavirus
DAAPAENKDPY

SEQ ID NO: 30635 - protein, 9 aa, Artificial Sequence
  Peptide Derived from Human Papillomavirus
DGDMVDTGY

SEQ ID NO: 30636 - protein, 9 aa, Artificial Sequence
  Peptide Derived from Human Papillomavirus
DSQLFNKPY

SEQ ID NO: 30637 - protein, 8 aa, Artificial Sequence
  Peptide Derived from Human Papillomavirus
DTVPQSLY

SEQ ID NO: 30638 - protein, 8 aa, Artificial Sequence
  Peptide Derived from Human Papillomavirus
FSLDLDQY

SEQ ID NO: 30639 - protein, 8 aa, Artificial Sequence
  Peptide Derived from Human Papillomavirus
GLSGHPFY

SEQ ID NO: 30640 - protein, 11 aa, Artificial Sequence
  Peptide Derived from Human Papillomavirus
GMPASPGSCVY

SEQ ID NO: 30641 - protein, 10 aa, Artificial Sequence
  Peptide Derived from Human Papillomavirus
ITLTADVMSY

SEQ ID NO: 30642 - protein, 9 aa, Artificial Sequence
  Peptide Derived from Human Papillomavirus
KFSLDLDQY

SEQ ID NO: 30643 - protein, 10 aa, Artificial Sequence
  Peptide Derived from Human Papillomavirus
KQDIPKVSAY

SEQ ID NO: 30644 - protein, 11 aa, Artificial Sequence
  Peptide Derived from Human Papillomavirus
LEDGDMVDTGY

SEQ ID NO: 30645 - protein, 8 aa, Artificial Sequence
  Peptide Derived from Human Papillomavirus
LTADVMSY

SEQ ID NO: 30646 - protein, 10 aa, Artificial Sequence
  Peptide Derived from Human Papillomavirus
MGDTVPQSLY

SEQ ID NO: 30647 - protein, 10 aa, Artificial Sequence
  Peptide Derived from Human Papillomavirus
MPASPGSCVY

SEQ ID NO: 30648 - protein, 8 aa, Artificial Sequence
  Peptide Derived from Human Papillomavirus
PAENKDPY

SEQ ID NO: 30649 - protein, 9 aa, Artificial Sequence
  Peptide Derived from Human Papillomavirus
PASPGSCVY

SEQ ID NO: 30650 - protein, 11 aa, Artificial Sequence
  Peptide Derived from Human Papillomavirus
PLDICQSICKY

SEQ ID NO: 30651 - protein, 9 aa, Artificial Sequence
  Peptide Derived from Human Papillomavirus
PTTSLVDTY

SEQ ID NO: 30652 - protein, 9 aa, Artificial Sequence
  Peptide Derived from Human Papillomavirus
QSICKYPDY

SEQ ID NO: 30653 - protein, 8 aa, Artificial Sequence
  Peptide Derived from Human Papillomavirus
QSPVPGQY

SEQ ID NO: 30654 - protein, 10 aa, Artificial Sequence
  Peptide Derived from Human Papillomavirus
QYDATKFKQY

SEQ ID NO: 30655 - protein, 9 aa, Artificial Sequence
  Peptide Derived from Human Papillomavirus
QYSRHVEEY

SEQ ID NO: 30656 - protein, 8 aa, Artificial Sequence
  Peptide Derived from Human Papillomavirus
RPSDNTVY

SEQ ID NO: 30657 - protein, 10 aa, Artificial Sequence
  Peptide Derived from Human Papillomavirus
SDSQLFNKPY

SEQ ID NO: 30658 - protein, 11 aa, Artificial Sequence
  Peptide Derived from Human Papillomavirus
SSRLLTVGNPY

SEQ ID NO: 30659 - protein, 10 aa, Artificial Sequence
  Peptide Derived from Human Papillomavirus
STQSPVPGQY

SEQ ID NO: 30660 - protein, 11 aa, Artificial Sequence
  Peptide Derived from Human Papillomavirus
SVARVVNTDDY

SEQ ID NO: 30661 - protein, 11 aa, Artificial Sequence
  Peptide Derived from Human Papillomavirus
TMGDTVPQSLY

SEQ ID NO: 30662 - protein, 9 aa, Artificial Sequence
  Peptide Derived from Human Papillomavirus
TQSPVPGQY

SEQ ID NO: 30663 - protein, 11 aa, Artificial Sequence
  Peptide Derived from Human Papillomavirus
TSDSQLFNKPY

SEQ ID NO: 30664 - protein, 8 aa, Artificial Sequence
  Peptide Derived from Human Papillomavirus
TTSLVDTY

SEQ ID NO: 30665 - protein, 9 aa, Artificial Sequence
  Peptide Derived from Human Papillomavirus
VRDNVSVDY

SEQ ID NO: 30666 - protein, 8 aa, Artificial Sequence
  Peptide Derived from Human Papillomavirus
VTPTSIFY

SEQ ID NO: 30667 - protein, 9 aa, Artificial Sequence
  Peptide Derived from Human Papillomavirus
YDATKFKQY

SEQ ID NO: 30668 - protein, 11 aa, Artificial Sequence
  Peptide Derived from Human Papillomavirus
YMVHIIICGHY

SEQ ID NO: 30669 - protein, 8 aa, Artificial Sequence
  Peptide Derived from Human Papillomavirus
YSRHVEEY

SEQ ID NO: 30670 - protein, 9 aa, Artificial Sequence
  Peptide Derived from Human Papillomavirus
YTRVLILHY

SEQ ID NO: 30671 - protein, 11 aa, Artificial Sequence
  Peptide Derived from Human Papillomavirus
ATEDNDLFDIY

SEQ ID NO: 30672 - protein, 11 aa, Artificial Sequence
  Peptide Derived from Human Papillomavirus
DISPIAPSPEY

SEQ ID NO: 30673 - protein, 8 aa, Artificial Sequence
  Peptide Derived from Human Papillomavirus
DNDLFDIY

SEQ ID NO: 30674 - protein, 10 aa, Artificial Sequence
  Peptide Derived from Human Papillomavirus
GSGTGGRTGY

SEQ ID NO: 30675 - protein, 8 aa, Artificial Sequence
  Peptide Derived from Human Papillomavirus
GTGGRTGY

SEQ ID NO: 30676 - protein, 10 aa, Artificial Sequence
  Peptide Derived from Human Papillomavirus
GTHYYLWPLY

SEQ ID NO: 30677 - protein, 11 aa, Artificial Sequence
  Peptide Derived from Human Papillomavirus
GTHYYLWPLYY

SEQ ID NO: 30678 - protein, 10 aa, Artificial Sequence
  Peptide Derived from Human Papillomavirus
GTPTSGTHGY

SEQ ID NO: 30679 - protein, 11 aa, Artificial Sequence
  Peptide Derived from Human Papillomavirus
GTQIGARVHFY

SEQ ID NO: 30680 - protein, 8 aa, Artificial Sequence
  Peptide Derived from Human Papillomavirus
IGARVHFY

SEQ ID NO: 30681 - protein, 10 aa, Artificial Sequence
  Peptide Derived from Human Papillomavirus
ISPIAPSPEY

SEQ ID NO: 30682 - protein, 9 aa, Artificial Sequence
  Peptide Derived from Human Papillomavirus
KRASVTDLY

SEQ ID NO: 30683 - protein, 10 aa, Artificial Sequence
  Peptide Derived from Human Papillomavirus
LTRPSSLITY

SEQ ID NO: 30684 - protein, 10 aa, Artificial Sequence
  Peptide Derived from Human Papillomavirus
LTSSWDVPVY

SEQ ID NO: 30685 - protein, 8 aa, Artificial Sequence
  Peptide Derived from Human Papillomavirus
PIAPSPEY

SEQ ID NO: 30686 - protein, 9 aa, Artificial Sequence
  Peptide Derived from Human Papillomavirus
PTAPASTQY

SEQ ID NO: 30687 - protein, 9 aa, Artificial Sequence
  Peptide Derived from Human Papillomavirus
PTISSASSY

SEQ ID NO: 30688 - protein, 8 aa, Artificial Sequence
  Peptide Derived from Human Papillomavirus
PTSGTHGY

SEQ ID NO: 30689 - protein, 8 aa, Artificial Sequence
  Peptide Derived from Human Papillomavirus
RASVTDLY

SEQ ID NO: 30690 - protein, 8 aa, Artificial Sequence
  Peptide Derived from Human Papillomavirus
RPSSLITY

SEQ ID NO: 30691 - protein, 11 aa, Artificial Sequence
  Peptide Derived from Human Papillomavirus
RSTTSFAFFKY

SEQ ID NO: 30692 - protein, 8 aa, Artificial Sequence
  Peptide Derived from Human Papillomavirus
RVAGPRLY

SEQ ID NO: 30693 - protein, 8 aa, Artificial Sequence
  Peptide Derived from Human Papillomavirus
SSWDVPVY

SEQ ID NO: 30694 - protein, 10 aa, Artificial Sequence
  Peptide Derived from Human Papillomavirus
STTSFAFFKY

SEQ ID NO: 30695 - protein, 10 aa, Artificial Sequence
  Peptide Derived from Human Papillomavirus
TEDNDLFDIY

SEQ ID NO: 30696 - protein, 11 aa, Artificial Sequence
  Peptide Derived from Human Papillomavirus
TGSGTGGRTGY

SEQ ID NO: 30697 - protein, 8 aa, Artificial Sequence
  Peptide Derived from Human Papillomavirus
TISSASSY

SEQ ID NO: 30698 - protein, 8 aa, Artificial Sequence
  Peptide Derived from Human Papillomavirus
TSFAFFKY

SEQ ID NO: 30699 - protein, 9 aa, Artificial Sequence
  Peptide Derived from Human Papillomavirus
TSSWDVPVY

SEQ ID NO: 30700 - protein, 9 aa, Artificial Sequence
  Peptide Derived from Human Papillomavirus
TTSFAFFKY

SEQ ID NO: 30701 - protein, 11 aa, Artificial Sequence
  Peptide Derived from Human Papillomavirus
VSPTAPASTQY

SEQ ID NO: 30702 - protein, 11 aa, Artificial Sequence
  Peptide Derived from Human Papillomavirus
YSPTISSASSY

SEQ ID NO: 30703 - protein, 11 aa, Artificial Sequence
  Peptide Derived from Human Papillomavirus
AEAVQVLKRKY

SEQ ID NO: 30704 - protein, 10 aa, Artificial Sequence
  Peptide Derived from Human Papillomavirus
AMLGKFKELY

SEQ ID NO: 30705 - protein, 8 aa, Artificial Sequence
  Peptide Derived from Human Papillomavirus
ATTPCWHY

SEQ ID NO: 30706 - protein, 10 aa, Artificial Sequence
  Peptide Derived from Human Papillomavirus
DDATTPCWHY

SEQ ID NO: 30707 - protein, 9 aa, Artificial Sequence
  Peptide Derived from Human Papillomavirus
DDSEIAYKY

SEQ ID NO: 30708 - protein, 8 aa, Artificial Sequence
  Peptide Derived from Human Papillomavirus
DISSCVDY

SEQ ID NO: 30709 - protein, 10 aa, Artificial Sequence
  Peptide Derived from Human Papillomavirus
DLSQMVQWAY

SEQ ID NO: 30710 - protein, 8 aa, Artificial Sequence
  Peptide Derived from Human Papillomavirus
DSEIAYKY

SEQ ID NO: 30711 - protein, 8 aa, Artificial Sequence
  Peptide Derived from Human Papillomavirus
FIDNCNVY

SEQ ID NO: 30712 - protein, 8 aa, Artificial Sequence
  Peptide Derived from Human Papillomavirus
GKDDRWPY

SEQ ID NO: 30713 - protein, 9 aa, Artificial Sequence
  Peptide Derived from Human Papillomavirus
GMSNISDVY

SEQ ID NO: 30714 - protein, 9 aa, Artificial Sequence
  Peptide Derived from Human Papillomavirus
GTGCNGWFY

SEQ ID NO: 30715 - protein, 10 aa, Artificial Sequence
  Peptide Derived from Human Papillomavirus
HGAPNTGKSY

SEQ ID NO: 30716 - protein, 11 aa, Artificial Sequence
  Peptide Derived from Human Papillomavirus
INAGKDDRWPY

SEQ ID NO: 30717 - protein, 11 aa, Artificial Sequence
  Peptide Derived from Human Papillomavirus
ISFLQGCIISY

SEQ ID NO: 30718 - protein, 10 aa, Artificial Sequence
  Peptide Derived from Human Papillomavirus
KTLLQPYCLY

SEQ ID NO: 30719 - protein, 11 aa, Artificial Sequence
  Peptide Derived from Human Papillomavirus
LDDATTPCWHY

SEQ ID NO: 30720 - protein, 9 aa, Artificial Sequence
  Peptide Derived from Human Papillomavirus
LFELPDSGY

SEQ ID NO: 30721 - protein, 9 aa, Artificial Sequence
  Peptide Derived from Human Papillomavirus
LRSTAAALY

SEQ ID NO: 30722 - protein, 11 aa, Artificial Sequence
  Peptide Derived from Human Papillomavirus
LRSTAAALYWY

SEQ ID NO: 30723 - protein, 10 aa, Artificial Sequence
  Peptide Derived from Human Papillomavirus
LSDISSCVDY

SEQ ID NO: 30724 - protein, 9 aa, Artificial Sequence
  Peptide Derived from Human Papillomavirus
LSQMVQWAY

SEQ ID NO: 30725 - protein, 8 aa, Artificial Sequence
  Peptide Derived from Human Papillomavirus
MDDSEIAY

SEQ ID NO: 30726 - protein, 10 aa, Artificial Sequence
  Peptide Derived from Human Papillomavirus
MDDSEIAYKY

SEQ ID NO: 30727 - protein, 8 aa, Artificial Sequence
  Peptide Derived from Human Papillomavirus
MSNISDVY

SEQ ID NO: 30728 - protein, 11 aa, Artificial Sequence
  Peptide Derived from Human Papillomavirus
MVDFIDNCNVY

SEQ ID NO: 30729 - protein, 10 aa, Artificial Sequence
  Peptide Derived from Human Papillomavirus
PFDKNGNPVY

SEQ ID NO: 30730 - protein, 11 aa, Artificial Sequence
  Peptide Derived from Human Papillomavirus
PLSDISSCVDY

SEQ ID NO: 30731 - protein, 8 aa, Artificial Sequence
  Peptide Derived from Human Papillomavirus
RSTAAALY

SEQ ID NO: 30732 - protein, 10 aa, Artificial Sequence
  Peptide Derived from Human Papillomavirus
RSTAAALYWY

SEQ ID NO: 30733 - protein, 11 aa, Artificial Sequence
  Peptide Derived from Human Papillomavirus
RTGMSNISDVY

SEQ ID NO: 30734 - protein, 9 aa, Artificial Sequence
  Peptide Derived from Human Papillomavirus
STAAALYWY

SEQ ID NO: 30735 - protein, 8 aa, Artificial Sequence
  Peptide Derived from Human Papillomavirus
TAAALYWY

SEQ ID NO: 30736 - protein, 11 aa, Artificial Sequence
  Peptide Derived from Human Papillomavirus
TTPCWHYIDNY

SEQ ID NO: 30737 - protein, 11 aa, Artificial Sequence
  Peptide Derived from Human Papillomavirus
VKDCGTMCRHY

SEQ ID NO: 30738 - protein, 9 aa, Artificial Sequence
  Peptide Derived from Human Papillomavirus
VMDDSEIAY

SEQ ID NO: 30739 - protein, 11 aa, Artificial Sequence
  Peptide Derived from Human Papillomavirus
VMDDSEIAYKY

SEQ ID NO: 30740 - protein, 10 aa, Artificial Sequence
  Peptide Derived from Human Papillomavirus
WRDIVKFLRY

SEQ ID NO: 30741 - protein, 9 aa, Artificial Sequence
  Peptide Derived from Human Papillomavirus
CQDKILEHY

SEQ ID NO: 30742 - protein, 10 aa, Artificial Sequence
  Peptide Derived from Human Papillomavirus
DGDVHNTMHY

SEQ ID NO: 30743 - protein, 11 aa, Artificial Sequence
  Peptide Derived from Human Papillomavirus
DSKRLCDHIDY

SEQ ID NO: 30744 - protein, 8 aa, Artificial Sequence
  Peptide Derived from Human Papillomavirus
ETLNNTEY

SEQ ID NO: 30745 - protein, 8 aa, Artificial Sequence
  Peptide Derived from Human Papillomavirus
FTEEAKKY

SEQ ID NO: 30746 - protein, 11 aa, Artificial Sequence
  Peptide Derived from Human Papillomavirus
GDANILKCLRY

SEQ ID NO: 30747 - protein, 9 aa, Artificial Sequence
  Peptide Derived from Human Papillomavirus
KNAIVTLTY

SEQ ID NO: 30748 - protein, 8 aa, Artificial Sequence
  Peptide Derived from Human Papillomavirus
LSKYKQLY

SEQ ID NO: 30749 - protein, 10 aa, Artificial Sequence
  Peptide Derived from Human Papillomavirus
MLETLNNTEY

SEQ ID NO: 30750 - protein, 11 aa, Artificial Sequence
  Peptide Derived from Human Papillomavirus
MMLETLNNTEY

SEQ ID NO: 30751 - protein, 9 aa, Artificial Sequence
  Peptide Derived from Human Papillomavirus
NTVSVSTGY

SEQ ID NO: 30752 - protein, 10 aa, Artificial Sequence
  Peptide Derived from Human Papillomavirus
PTGCLKKHGY

SEQ ID NO: 30753 - protein, 8 aa, Artificial Sequence
  Peptide Derived from Human Papillomavirus
RLECVLMY

SEQ ID NO: 30754 - protein, 9 aa, Artificial Sequence
  Peptide Derived from Human Papillomavirus
RLSKYKQLY

SEQ ID NO: 30755 - protein, 11 aa, Artificial Sequence
  Peptide Derived from Human Papillomavirus
TMHYTNWKFIY

SEQ ID NO: 30756 - protein, 10 aa, Artificial Sequence
  Peptide Derived from Human Papillomavirus
TMQQTSLELY

SEQ ID NO: 30757 - protein, 8 aa, Artificial Sequence
  Peptide Derived from Human Papillomavirus
TVSVSTGY

SEQ ID NO: 30758 - protein, 8 aa, Artificial Sequence
  Peptide Derived from Human Papillomavirus
VHEGHITY

SEQ ID NO: 30759 - protein, 11 aa, Artificial Sequence
  Peptide Derived from Human Papillomavirus
WTMQQTSLELY

SEQ ID NO: 30760 - protein, 8 aa, Artificial Sequence
  Peptide Derived from Human Papillomavirus
YTNWKFIY

SEQ ID NO: 30761 - protein, 11 aa, Artificial Sequence
  Peptide Derived from Human Papillomavirus
ATSPLRCFCIY

SEQ ID NO: 30762 - protein, 10 aa, Artificial Sequence
  Peptide Derived from Human Papillomavirus
TSPLRCFCIY

SEQ ID NO: 30763 - protein, 8 aa, Artificial Sequence
  Peptide Derived from Human Papillomavirus
CTKCLRFY

SEQ ID NO: 30764 - protein, 11 aa, Artificial Sequence
  Peptide Derived from Human Papillomavirus
DFAFTDLTIVY

SEQ ID NO: 30765 - protein, 10 aa, Artificial Sequence
  Peptide Derived from Human Papillomavirus
ELSSALEIPY

SEQ ID NO: 30766 - protein, 8 aa, Artificial Sequence
  Peptide Derived from Human Papillomavirus
FTDLTIVY

SEQ ID NO: 30767 - protein, 11 aa, Artificial Sequence
  Peptide Derived from Human Papillomavirus
FYSKVSEFRWY

SEQ ID NO: 30768 - protein, 8 aa, Artificial Sequence
  Peptide Derived from Human Papillomavirus
KVSEFRWY

SEQ ID NO: 30769 - protein, 10 aa, Artificial Sequence
  Peptide Derived from Human Papillomavirus
KVSEFRWYRY

SEQ ID NO: 30770 - protein, 9 aa, Artificial Sequence
  Peptide Derived from Human Papillomavirus
LSSALEIPY

SEQ ID NO: 30771 - protein, 11 aa, Artificial Sequence
  Peptide Derived from Human Papillomavirus
PYDELRLNCVY

SEQ ID NO: 30772 - protein, 8 aa, Artificial Sequence
  Peptide Derived from Human Papillomavirus
SSALEIPY

SEQ ID NO: 30773 - protein, 9 aa, Artificial Sequence
  Peptide Derived from Human Papillomavirus
VSEFRWYRY

SEQ ID NO: 30774 - protein, 10 aa, Artificial Sequence
  Peptide Derived from Human Papillomavirus
YDELRLNCVY

SEQ ID NO: 30775 - protein, 10 aa, Artificial Sequence
  Peptide Derived from Human Papillomavirus
YSKVSEFRWY

SEQ ID NO: 30776 - protein, 8 aa, Artificial Sequence
  Peptide Derived from Human Papillomavirus
ETPTLQDY

SEQ ID NO: 30777 - protein, 10 aa, Artificial Sequence
  Peptide Derived from Human Papillomavirus
GQAEPDTSNY

SEQ ID NO: 30778 - protein, 9 aa, Artificial Sequence
  Peptide Derived from Human Papillomavirus
PEATDLHCY

SEQ ID NO: 30779 - protein, 9 aa, Artificial Sequence
  Peptide Derived from Human Papillomavirus
QAEPDTSNY

SEQ ID NO: 30780 - protein, 10 aa, Artificial Sequence
  Peptide Derived from Human Papillomavirus
QPEATDLHCY

SEQ ID NO: 30781 - protein, 10 aa, Artificial Sequence
  Peptide Derived from Human Papillomavirus
RGETPTLQDY

SEQ ID NO: 30782 - protein, 8 aa, Artificial Sequence
  Peptide Derived from Human Papillomavirus
ATLANSTY

SEQ ID NO: 30783 - protein, 10 aa, Artificial Sequence
  Peptide Derived from Human Papillomavirus
CNSICKYPDY

SEQ ID NO: 30784 - protein, 8 aa, Artificial Sequence
  Peptide Derived from Human Papillomavirus
DTENSNRY

SEQ ID NO: 30785 - protein, 8 aa, Artificial Sequence
  Peptide Derived from Human Papillomavirus
ESVPTDLY

SEQ ID NO: 30786 - protein, 10 aa, Artificial Sequence
  Peptide Derived from Human Papillomavirus
FDDTENSNRY

SEQ ID NO: 30787 - protein, 9 aa, Artificial Sequence
  Peptide Derived from Human Papillomavirus
FKSSNFKEY

SEQ ID NO: 30788 - protein, 9 aa, Artificial Sequence
  Peptide Derived from Human Papillomavirus
GESVPTDLY

SEQ ID NO: 30789 - protein, 11 aa, Artificial Sequence
  Peptide Derived from Human Papillomavirus
GSTATLANSTY

SEQ ID NO: 30790 - protein, 10 aa, Artificial Sequence
  Peptide Derived from Human Papillomavirus
ITLSADIMTY

SEQ ID NO: 30791 - protein, 8 aa, Artificial Sequence
  Peptide Derived from Human Papillomavirus
KEDPFKDY

SEQ ID NO: 30792 - protein, 11 aa, Artificial Sequence
  Peptide Derived from Human Papillomavirus
KFDDTENSNRY

SEQ ID NO: 30793 - protein, 8 aa, Artificial Sequence
  Peptide Derived from Human Papillomavirus
KSSNFKEY

SEQ ID NO: 30794 - protein, 8 aa, Artificial Sequence
  Peptide Derived from Human Papillomavirus
LSADIMTY

SEQ ID NO: 30795 - protein, 8 aa, Artificial Sequence
  Peptide Derived from Human Papillomavirus
LTVGHPYY

SEQ ID NO: 30796 - protein, 9 aa, Artificial Sequence
  Peptide Derived from Human Papillomavirus
NRECISMDY

SEQ ID NO: 30797 - protein, 9 aa, Artificial Sequence
  Peptide Derived from Human Papillomavirus
NSICKYPDY

SEQ ID NO: 30798 - protein, 9 aa, Artificial Sequence
  Peptide Derived from Human Papillomavirus
PKEDPFKDY

SEQ ID NO: 30799 - protein, 11 aa, Artificial Sequence
  Peptide Derived from Human Papillomavirus
PLDICNSICKY

SEQ ID NO: 30800 - protein, 10 aa, Artificial Sequence
  Peptide Derived from Human Papillomavirus
PPSGSLEDTY

SEQ ID NO: 30801 - protein, 9 aa, Artificial Sequence
  Peptide Derived from Human Papillomavirus
PSGSLEDTY

SEQ ID NO: 30802 - protein, 11 aa, Artificial Sequence
  Peptide Derived from Human Papillomavirus
PVSKVVSTDEY

SEQ ID NO: 30803 - protein, 8 aa, Artificial Sequence
  Peptide Derived from Human Papillomavirus
RPSEATVY

SEQ ID NO: 30804 - protein, 10 aa, Artificial Sequence
  Peptide Derived from Human Papillomavirus
SDAQIFNKPY

SEQ ID NO: 30805 - protein, 8 aa, Artificial Sequence
  Peptide Derived from Human Papillomavirus
SGSLEDTY

SEQ ID NO: 30806 - protein, 10 aa, Artificial Sequence
  Peptide Derived from Human Papillomavirus
STATLANSTY

SEQ ID NO: 30807 - protein, 11 aa, Artificial Sequence
  Peptide Derived from Human Papillomavirus
TDEYVTRTNIY

SEQ ID NO: 30808 - protein, 9 aa, Artificial Sequence
  Peptide Derived from Human Papillomavirus
TLSADIMTY

SEQ ID NO: 30809 - protein, 11 aa, Artificial Sequence
  Peptide Derived from Human Papillomavirus
TSDAQIFNKPY

SEQ ID NO: 30810 - protein, 11 aa, Artificial Sequence
  Peptide Derived from Human Papillomavirus
TTFKSSNFKEY

SEQ ID NO: 30811 - protein, 10 aa, Artificial Sequence
  Peptide Derived from Human Papillomavirus
VGESVPTDLY

SEQ ID NO: 30812 - protein, 10 aa, Artificial Sequence
  Peptide Derived from Human Papillomavirus
VSKVVSTDEY

SEQ ID NO: 30813 - protein, 8 aa, Artificial Sequence
  Peptide Derived from Human Papillomavirus
VTRTNIYY

SEQ ID NO: 30814 - protein, 8 aa, Artificial Sequence
  Peptide Derived from Human Papillomavirus
YGDTLFFY

SEQ ID NO: 30815 - protein, 9 aa, Artificial Sequence
  Peptide Derived from Human Papillomavirus
ATIGARVHY

SEQ ID NO: 30816 - protein, 10 aa, Artificial Sequence
  Peptide Derived from Human Papillomavirus
ATIGARVHYY

SEQ ID NO: 30817 - protein, 11 aa, Artificial Sequence
  Peptide Derived from Human Papillomavirus
ATIGARVHYYY

SEQ ID NO: 30818 - protein, 10 aa, Artificial Sequence
  Peptide Derived from Human Papillomavirus
ETVNAEESLY

SEQ ID NO: 30819 - protein, 11 aa, Artificial Sequence
  Peptide Derived from Human Papillomavirus
FLSAPKQLITY

SEQ ID NO: 30820 - protein, 8 aa, Artificial Sequence
  Peptide Derived from Human Papillomavirus
FVDGGDFY

SEQ ID NO: 30821 - protein, 10 aa, Artificial Sequence
  Peptide Derived from Human Papillomavirus
GGDFYLHPSY

SEQ ID NO: 30822 - protein, 11 aa, Artificial Sequence
  Peptide Derived from Human Papillomavirus
GGDFYLHPSYY

SEQ ID NO: 30823 - protein, 10 aa, Artificial Sequence
  Peptide Derived from Human Papillomavirus
GSGTGGRTGY

SEQ ID NO: 30824 - protein, 8 aa, Artificial Sequence
  Peptide Derived from Human Papillomavirus
GTGGRTGY

SEQ ID NO: 30825 - protein, 11 aa, Artificial Sequence
  Peptide Derived from Human Papillomavirus
HTTIADQILRY

SEQ ID NO: 30826 - protein, 8 aa, Artificial Sequence
  Peptide Derived from Human Papillomavirus
IADQILRY

SEQ ID NO: 30827 - protein, 8 aa, Artificial Sequence
  Peptide Derived from Human Papillomavirus
IGARVHYY

SEQ ID NO: 30828 - protein, 9 aa, Artificial Sequence
  Peptide Derived from Human Papillomavirus
IGARVHYYY

SEQ ID NO: 30829 - protein, 8 aa, Artificial Sequence
  Peptide Derived from Human Papillomavirus
ITYENPAY

SEQ ID NO: 30830 - protein, 9 aa, Artificial Sequence
  Peptide Derived from Human Papillomavirus
KRASATQLY

SEQ ID NO: 30831 - protein, 9 aa, Artificial Sequence
  Peptide Derived from Human Papillomavirus
LNDGLYDIY

SEQ ID NO: 30832 - protein, 10 aa, Artificial Sequence
  Peptide Derived from Human Papillomavirus
LSAPKQLITY

SEQ ID NO: 30833 - protein, 11 aa, Artificial Sequence
  Peptide Derived from Human Papillomavirus
LSSSSISTHNY

SEQ ID NO: 30834 - protein, 10 aa, Artificial Sequence
  Peptide Derived from Human Papillomavirus
LTSRRNTVRY

SEQ ID NO: 30835 - protein, 9 aa, Artificial Sequence
  Peptide Derived from Human Papillomavirus
QSTSAVSAY

SEQ ID NO: 30836 - protein, 8 aa, Artificial Sequence
  Peptide Derived from Human Papillomavirus
RASATQLY

SEQ ID NO: 30837 - protein, 8 aa, Artificial Sequence
  Peptide Derived from Human Papillomavirus
RPARLGLY

SEQ ID NO: 30838 - protein, 11 aa, Artificial Sequence
  Peptide Derived from Human Papillomavirus
RTKRASATQLY

SEQ ID NO: 30839 - protein, 11 aa, Artificial Sequence
  Peptide Derived from Human Papillomavirus
SGATIGARVHY

SEQ ID NO: 30840 - protein, 11 aa, Artificial Sequence
  Peptide Derived from Human Papillomavirus
SGSGTGGRTGY

SEQ ID NO: 30841 - protein, 8 aa, Artificial Sequence
  Peptide Derived from Human Papillomavirus
SSISTHNY

SEQ ID NO: 30842 - protein, 9 aa, Artificial Sequence
  Peptide Derived from Human Papillomavirus
SSSISTHNY

SEQ ID NO: 30843 - protein, 10 aa, Artificial Sequence
  Peptide Derived from Human Papillomavirus
SSSSISTHNY

SEQ ID NO: 30844 - protein, 8 aa, Artificial Sequence
  Peptide Derived from Human Papillomavirus
STLNDGLY

SEQ ID NO: 30845 - protein, 11 aa, Artificial Sequence
  Peptide Derived from Human Papillomavirus
STLNDGLYDIY

SEQ ID NO: 30846 - protein, 8 aa, Artificial Sequence
  Peptide Derived from Human Papillomavirus
STSAVSAY

SEQ ID NO: 30847 - protein, 9 aa, Artificial Sequence
  Peptide Derived from Human Papillomavirus
TIADQILRY

SEQ ID NO: 30848 - protein, 9 aa, Artificial Sequence
  Peptide Derived from Human Papillomavirus
TSRRNTVRY

SEQ ID NO: 30849 - protein, 9 aa, Artificial Sequence
  Peptide Derived from Human Papillomavirus
TSTLNDGLY

SEQ ID NO: 30850 - protein, 10 aa, Artificial Sequence
  Peptide Derived from Human Papillomavirus
TTIADQILRY

SEQ ID NO: 30851 - protein, 10 aa, Artificial Sequence
  Peptide Derived from Human Papillomavirus
TTSTLNDGLY

SEQ ID NO: 30852 - protein, 11 aa, Artificial Sequence
  Peptide Derived from Human Papillomavirus
TTTSTLNDGLY

SEQ ID NO: 30853 - protein, 8 aa, Artificial Sequence
  Peptide Derived from Human Papillomavirus
VNAEESLY

SEQ ID NO: 30854 - protein, 10 aa, Artificial Sequence
  Peptide Derived from Human Papillomavirus
VQSTSAVSAY

SEQ ID NO: 30855 - protein, 11 aa, Artificial Sequence
  Peptide Derived from Human Papillomavirus
VSIFVDGGDFY

SEQ ID NO: 30856 - protein, 9 aa, Artificial Sequence
  Peptide Derived from Human Papillomavirus
CTDWCITGY

SEQ ID NO: 30857 - protein, 8 aa, Artificial Sequence
  Peptide Derived from Human Papillomavirus
DDSDIAYY

SEQ ID NO: 30858 - protein, 9 aa, Artificial Sequence
  Peptide Derived from Human Papillomavirus
DDSDIAYYY

SEQ ID NO: 30859 - protein, 10 aa, Artificial Sequence
  Peptide Derived from Human Papillomavirus
DLSEMVQWAY

SEQ ID NO: 30860 - protein, 8 aa, Artificial Sequence
  Peptide Derived from Human Papillomavirus
DSDIAYYY

SEQ ID NO: 30861 - protein, 9 aa, Artificial Sequence
  Peptide Derived from Human Papillomavirus
FDENGNPVY

SEQ ID NO: 30862 - protein, 9 aa, Artificial Sequence
  Peptide Derived from Human Papillomavirus
GPANTGKSY

SEQ ID NO: 30863 - protein, 8 aa, Artificial Sequence
  Peptide Derived from Human Papillomavirus
GTDSRWPY

SEQ ID NO: 30864 - protein, 11 aa, Artificial Sequence
  Peptide Derived from Human Papillomavirus
HSSNTKANILY

SEQ ID NO: 30865 - protein, 11 aa, Artificial Sequence
  Peptide Derived from Human Papillomavirus
IDDVTPISWTY

SEQ ID NO: 30866 - protein, 9 aa, Artificial Sequence
  Peptide Derived from Human Papillomavirus
IDELEDSGY

SEQ ID NO: 30867 - protein, 9 aa, Artificial Sequence
  Peptide Derived from Human Papillomavirus
ISWTYIDDY

SEQ ID NO: 30868 - protein, 10 aa, Artificial Sequence
  Peptide Derived from Human Papillomavirus
KIDELEDSGY

SEQ ID NO: 30869 - protein, 9 aa, Artificial Sequence
  Peptide Derived from Human Papillomavirus
LRSQTCALY

SEQ ID NO: 30870 - protein, 9 aa, Artificial Sequence
  Peptide Derived from Human Papillomavirus
LSEMVQWAY

SEQ ID NO: 30871 - protein, 9 aa, Artificial Sequence
  Peptide Derived from Human Papillomavirus
LTDDSDIAY

SEQ ID NO: 30872 - protein, 10 aa, Artificial Sequence
  Peptide Derived from Human Papillomavirus
LTDDSDIAYY

SEQ ID NO: 30873 - protein, 11 aa, Artificial Sequence
  Peptide Derived from Human Papillomavirus
LTDDSDIAYYY

SEQ ID NO: 30874 - protein, 8 aa, Artificial Sequence
  Peptide Derived from Human Papillomavirus
NTKANILY

SEQ ID NO: 30875 - protein, 10 aa, Artificial Sequence
  Peptide Derived from Human Papillomavirus
PFDENGNPVY

SEQ ID NO: 30876 - protein, 10 aa, Artificial Sequence
  Peptide Derived from Human Papillomavirus
PISWTYIDDY

SEQ ID NO: 30877 - protein, 8 aa, Artificial Sequence
  Peptide Derived from Human Papillomavirus
RSQTCALY

SEQ ID NO: 30878 - protein, 10 aa, Artificial Sequence
  Peptide Derived from Human Papillomavirus
SSNTKANILY

SEQ ID NO: 30879 - protein, 8 aa, Artificial Sequence
  Peptide Derived from Human Papillomavirus
TDDSDIAY

SEQ ID NO: 30880 - protein, 9 aa, Artificial Sequence
  Peptide Derived from Human Papillomavirus
TDDSDIAYY

SEQ ID NO: 30881 - protein, 10 aa, Artificial Sequence
  Peptide Derived from Human Papillomavirus
TDDSDIAYYY

SEQ ID NO: 30882 - protein, 11 aa, Artificial Sequence
  Peptide Derived from Human Papillomavirus
TNAGTDSRWPY

SEQ ID NO: 30883 - protein, 11 aa, Artificial Sequence
  Peptide Derived from Human Papillomavirus
TSCTDWCITGY

SEQ ID NO: 30884 - protein, 11 aa, Artificial Sequence
  Peptide Derived from Human Papillomavirus
TSINKNKECTY

SEQ ID NO: 30885 - protein, 11 aa, Artificial Sequence
  Peptide Derived from Human Papillomavirus
VKDCGIMCRHY

SEQ ID NO: 30886 - protein, 8 aa, Artificial Sequence
  Peptide Derived from Human Papillomavirus
VTPISWTY

SEQ ID NO: 30887 - protein, 10 aa, Artificial Sequence
  Peptide Derived from Human Papillomavirus
ALETLSKSQY

SEQ ID NO: 30888 - protein, 10 aa, Artificial Sequence
  Peptide Derived from Human Papillomavirus
CTMVTGKVDY

SEQ ID NO: 30889 - protein, 10 aa, Artificial Sequence
  Peptide Derived from Human Papillomavirus
DNDKKNTMDY

SEQ ID NO: 30890 - protein, 10 aa, Artificial Sequence
  Peptide Derived from Human Papillomavirus
ESNSLKCLRY

SEQ ID NO: 30891 - protein, 8 aa, Artificial Sequence
  Peptide Derived from Human Papillomavirus
ETLSKSQY

SEQ ID NO: 30892 - protein, 8 aa, Artificial Sequence
  Peptide Derived from Human Papillomavirus
FKEDAAKY

SEQ ID NO: 30893 - protein, 11 aa, Artificial Sequence
  Peptide Derived from Human Papillomavirus
GESNSLKCLRY

SEQ ID NO: 30894 - protein, 8 aa, Artificial Sequence
  Peptide Derived from Human Papillomavirus
KVDYIGMY

SEQ ID NO: 30895 - protein, 9 aa, Artificial Sequence
  Peptide Derived from Human Papillomavirus
KVDYIGMYY

SEQ ID NO: 30896 - protein, 9 aa, Artificial Sequence
  Peptide Derived from Human Papillomavirus
NCEKVYFKY

SEQ ID NO: 30897 - protein, 8 aa, Artificial Sequence
  Peptide Derived from Human Papillomavirus
NSLKCLRY

SEQ ID NO: 30898 - protein, 9 aa, Artificial Sequence
  Peptide Derived from Human Papillomavirus
QGETVTVQY

SEQ ID NO: 30899 - protein, 8 aa, Artificial Sequence
  Peptide Derived from Human Papillomavirus
RMECALLY

SEQ ID NO: 30900 - protein, 9 aa, Artificial Sequence
  Peptide Derived from Human Papillomavirus
SNSLKCLRY

SEQ ID NO: 30901 - protein, 11 aa, Artificial Sequence
  Peptide Derived from Human Papillomavirus
TMDYTNWGEIY

SEQ ID NO: 30902 - protein, 9 aa, Artificial Sequence
  Peptide Derived from Human Papillomavirus
TMVTGKVDY

SEQ ID NO: 30903 - protein, 9 aa, Artificial Sequence
  Peptide Derived from Human Papillomavirus
VQEKILDLY

SEQ ID NO: 30904 - protein, 11 aa, Artificial Sequence
  Peptide Derived from Human Papillomavirus
VTGKVDYIGMY

SEQ ID NO: 30905 - protein, 8 aa, Artificial Sequence
  Peptide Derived from Human Papillomavirus
YTNWGEIY

SEQ ID NO: 30906 - protein, 10 aa, Artificial Sequence
  Peptide Derived from Human Papillomavirus
GSPLKIFFCY

SEQ ID NO: 30907 - protein, 11 aa, Artificial Sequence
  Peptide Derived from Human Papillomavirus
VGSPLKIFFCY

SEQ ID NO: 30908 - protein, 9 aa, Artificial Sequence
  Peptide Derived from Human Papillomavirus
AFADLTVVY

SEQ ID NO: 30909 - protein, 11 aa, Artificial Sequence
  Peptide Derived from Human Papillomavirus
DFAFADLTVVY

SEQ ID NO: 30910 - protein, 8 aa, Artificial Sequence
  Peptide Derived from Human Papillomavirus
FADLTVVY

SEQ ID NO: 30911 - protein, 8 aa, Artificial Sequence
  Peptide Derived from Human Papillomavirus
FLSKISEY

SEQ ID NO: 30912 - protein, 11 aa, Artificial Sequence
  Peptide Derived from Human Papillomavirus
FLSKISEYRHY

SEQ ID NO: 30913 - protein, 9 aa, Artificial Sequence
  Peptide Derived from Human Papillomavirus
ISEYRHYNY

SEQ ID NO: 30914 - protein, 8 aa, Artificial Sequence
  Peptide Derived from Human Papillomavirus
KISEYRHY

SEQ ID NO: 30915 - protein, 10 aa, Artificial Sequence
  Peptide Derived from Human Papillomavirus
KISEYRHYNY

SEQ ID NO: 30916 - protein, 10 aa, Artificial Sequence
  Peptide Derived from Human Papillomavirus
LSKISEYRHY

SEQ ID NO: 30917 - protein, 10 aa, Artificial Sequence
  Peptide Derived from Human Papillomavirus
GQAQPATADY

SEQ ID NO: 30918 - protein, 11 aa, Artificial Sequence
  Peptide Derived from Human Papillomavirus
GQAQPATADYY

SEQ ID NO: 30919 - protein, 9 aa, Artificial Sequence
  Peptide Derived from Human Papillomavirus
LKEYVLDLY

SEQ ID NO: 30920 - protein, 11 aa, Artificial Sequence
  Peptide Derived from Human Papillomavirus
PTLKEYVLDLY

SEQ ID NO: 30921 - protein, 8 aa, Artificial Sequence
  Peptide Derived from Human Papillomavirus
QPATADYY

SEQ ID NO: 30922 - protein, 8 aa, Artificial Sequence
  Peptide Derived from Human Papillomavirus
YPEPTDLY

SEQ ID NO: 30923 - protein, 10 aa, Artificial Sequence
  Peptide Derived from Human Papillomavirus
YPEPTDLYCY

SEQ ID NO: 30924 - protein, 10 aa, Artificial Sequence
  Peptide Derived from Human Papillomavirus
CGSTCKYPDY

SEQ ID NO: 30925 - protein, 10 aa, Artificial Sequence
  Peptide Derived from Human Papillomavirus
CTQVTSDSTY

SEQ ID NO: 30926 - protein, 8 aa, Artificial Sequence
  Peptide Derived from Human Papillomavirus
DTETGNKY

SEQ ID NO: 30927 - protein, 9 aa, Artificial Sequence
  Peptide Derived from Human Papillomavirus
EKEDPLGKY

SEQ ID NO: 30928 - protein, 9 aa, Artificial Sequence
  Peptide Derived from Human Papillomavirus
ESQLFNKPY

SEQ ID NO: 30929 - protein, 10 aa, Artificial Sequence
  Peptide Derived from Human Papillomavirus
FDDTETGNKY

SEQ ID NO: 30930 - protein, 11 aa, Artificial Sequence
  Peptide Derived from Human Papillomavirus
FKEYIRHVEEY

SEQ ID NO: 30931 - protein, 9 aa, Artificial Sequence
  Peptide Derived from Human Papillomavirus
GEAVPDDLY

SEQ ID NO: 30932 - protein, 9 aa, Artificial Sequence
  Peptide Derived from Human Papillomavirus
GSTCKYPDY

SEQ ID NO: 30933 - protein, 8 aa, Artificial Sequence
  Peptide Derived from Human Papillomavirus
KEDPLGKY

SEQ ID NO: 30934 - protein, 11 aa, Artificial Sequence
  Peptide Derived from Human Papillomavirus
KFDDTETGNKY

SEQ ID NO: 30935 - protein, 8 aa, Artificial Sequence
  Peptide Derived from Human Papillomavirus
KNENFKEY

SEQ ID NO: 30936 - protein, 10 aa, Artificial Sequence
  Peptide Derived from Human Papillomavirus
LGEAVPDDLY

SEQ ID NO: 30937 - protein, 8 aa, Artificial Sequence
  Peptide Derived from Human Papillomavirus
LLAVGHPY

SEQ ID NO: 30938 - protein, 8 aa, Artificial Sequence
  Peptide Derived from Human Papillomavirus
LTAEVMTY

SEQ ID NO: 30939 - protein, 9 aa, Artificial Sequence
  Peptide Derived from Human Papillomavirus
NRECLSMDY

SEQ ID NO: 30940 - protein, 11 aa, Artificial Sequence
  Peptide Derived from Human Papillomavirus
PIDICGSTCKY

SEQ ID NO: 30941 - protein, 11 aa, Artificial Sequence
  Peptide Derived from Human Papillomavirus
PKEKEDPLGKY

SEQ ID NO: 30942 - protein, 10 aa, Artificial Sequence
  Peptide Derived from Human Papillomavirus
PPSASLQDTY

SEQ ID NO: 30943 - protein, 9 aa, Artificial Sequence
  Peptide Derived from Human Papillomavirus
PSASLQDTY

SEQ ID NO: 30944 - protein, 11 aa, Artificial Sequence
  Peptide Derived from Human Papillomavirus
PVSKVVSTDEY

SEQ ID NO: 30945 - protein, 8 aa, Artificial Sequence
  Peptide Derived from Human Papillomavirus
RPSEATVY

SEQ ID NO: 30946 - protein, 8 aa, Artificial Sequence
  Peptide Derived from Human Papillomavirus
SASLQDTY

SEQ ID NO: 30947 - protein, 10 aa, Artificial Sequence
  Peptide Derived from Human Papillomavirus
SESQLFNKPY

SEQ ID NO: 30948 - protein, 11 aa, Artificial Sequence
  Peptide Derived from Human Papillomavirus
SSRLLAVGHPY

SEQ ID NO: 30949 - protein, 8 aa, Artificial Sequence
  Peptide Derived from Human Papillomavirus
STCKYPDY

SEQ ID NO: 30950 - protein, 11 aa, Artificial Sequence
  Peptide Derived from Human Papillomavirus
STYKNENFKEY

SEQ ID NO: 30951 - protein, 11 aa, Artificial Sequence
  Peptide Derived from Human Papillomavirus
TDEYVSRTSIY

SEQ ID NO: 30952 - protein, 11 aa, Artificial Sequence
  Peptide Derived from Human Papillomavirus
TSESQLFNKPY

SEQ ID NO: 30953 - protein, 10 aa, Artificial Sequence
  Peptide Derived from Human Papillomavirus
VSKVVSTDEY

SEQ ID NO: 30954 - protein, 8 aa, Artificial Sequence
  Peptide Derived from Human Papillomavirus
VSRTSIYY

SEQ ID NO: 30955 - protein, 9 aa, Artificial Sequence
  Peptide Derived from Human Papillomavirus
VSRTSIYYY

SEQ ID NO: 30956 - protein, 10 aa, Artificial Sequence
  Peptide Derived from Human Papillomavirus
VTLTAEVMTY

SEQ ID NO: 30957 - protein, 8 aa, Artificial Sequence
  Peptide Derived from Human Papillomavirus
YVSRTSIY

SEQ ID NO: 30958 - protein, 9 aa, Artificial Sequence
  Peptide Derived from Human Papillomavirus
YVSRTSIYY

SEQ ID NO: 30959 - protein, 10 aa, Artificial Sequence
  Peptide Derived from Human Papillomavirus
YVSRTSIYYY

SEQ ID NO: 30960 - protein, 11 aa, Artificial Sequence
  Peptide Derived from Human Papillomavirus
DGADFVLHPSY

SEQ ID NO: 30961 - protein, 11 aa, Artificial Sequence
  Peptide Derived from Human Papillomavirus
FSSPTVSTQSY

SEQ ID NO: 30962 - protein, 10 aa, Artificial Sequence
  Peptide Derived from Human Papillomavirus
GADFVLHPSY

SEQ ID NO: 30963 - protein, 8 aa, Artificial Sequence
  Peptide Derived from Human Papillomavirus
GSGGRTGY

SEQ ID NO: 30964 - protein, 10 aa, Artificial Sequence
  Peptide Derived from Human Papillomavirus
GSGSGGRTGY

SEQ ID NO: 30965 - protein, 11 aa, Artificial Sequence
  Peptide Derived from Human Papillomavirus
GSRPVARLGLY

SEQ ID NO: 30966 - protein, 11 aa, Artificial Sequence
  Peptide Derived from Human Papillomavirus
GSTIADQILKY

SEQ ID NO: 30967 - protein, 8 aa, Artificial Sequence
  Peptide Derived from Human Papillomavirus
HTPMQHSY

SEQ ID NO: 30968 - protein, 8 aa, Artificial Sequence
  Peptide Derived from Human Papillomavirus
HTVPNEQY

SEQ ID NO: 30969 - protein, 8 aa, Artificial Sequence
  Peptide Derived from Human Papillomavirus
IADQILKY

SEQ ID NO: 30970 - protein, 8 aa, Artificial Sequence
  Peptide Derived from Human Papillomavirus
IGARIHYY

SEQ ID NO: 30971 - protein, 9 aa, Artificial Sequence
  Peptide Derived from Human Papillomavirus
INDGLYDVY

SEQ ID NO: 30972 - protein, 9 aa, Artificial Sequence
  Peptide Derived from Human Papillomavirus
KRASATQLY

SEQ ID NO: 30973 - protein, 9 aa, Artificial Sequence
  Peptide Derived from Human Papillomavirus
LHDTSTSSY

SEQ ID NO: 30974 - protein, 10 aa, Artificial Sequence
  Peptide Derived from Human Papillomavirus
LTSPHKLITY

SEQ ID NO: 30975 - protein, 11 aa, Artificial Sequence
  Peptide Derived from Human Papillomavirus
PLDHTVPNEQY

SEQ ID NO: 30976 - protein, 8 aa, Artificial Sequence
  Peptide Derived from Human Papillomavirus
PTVSTQSY

SEQ ID NO: 30977 - protein, 8 aa, Artificial Sequence
  Peptide Derived from Human Papillomavirus
PVARLGLY

SEQ ID NO: 30978 - protein, 8 aa, Artificial Sequence
  Peptide Derived from Human Papillomavirus
RASATQLY

SEQ ID NO: 30979 - protein, 9 aa, Artificial Sequence
  Peptide Derived from Human Papillomavirus
SGSGGRTGY

SEQ ID NO: 30980 - protein, 10 aa, Artificial Sequence
  Peptide Derived from Human Papillomavirus
SSPTVSTQSY

SEQ ID NO: 30981 - protein, 10 aa, Artificial Sequence
  Peptide Derived from Human Papillomavirus
SSYSINDGLY

SEQ ID NO: 30982 - protein, 10 aa, Artificial Sequence
  Peptide Derived from Human Papillomavirus
STIADQILKY

SEQ ID NO: 30983 - protein, 9 aa, Artificial Sequence
  Peptide Derived from Human Papillomavirus
SYSINDGLY

SEQ ID NO: 30984 - protein, 11 aa, Artificial Sequence
  Peptide Derived from Human Papillomavirus
TGSGSGGRTGY

SEQ ID NO: 30985 - protein, 9 aa, Artificial Sequence
  Peptide Derived from Human Papillomavirus
TIADQILKY

SEQ ID NO: 30986 - protein, 9 aa, Artificial Sequence
  Peptide Derived from Human Papillomavirus
TSPHKLITY

SEQ ID NO: 30987 - protein, 11 aa, Artificial Sequence
  Peptide Derived from Human Papillomavirus
TSSYSINDGLY

SEQ ID NO: 30988 - protein, 8 aa, Artificial Sequence
  Peptide Derived from Human Papillomavirus
YSINDGLY

SEQ ID NO: 30989 - protein, 11 aa, Artificial Sequence
  Peptide Derived from Human Papillomavirus
YSINDGLYDVY

SEQ ID NO: 30990 - protein, 8 aa, Artificial Sequence
  Peptide Derived from Human Papillomavirus
AKDNKWPY

SEQ ID NO: 30991 - protein, 10 aa, Artificial Sequence
  Peptide Derived from Human Papillomavirus
AMLAVFKDIY

SEQ ID NO: 30992 - protein, 8 aa, Artificial Sequence
  Peptide Derived from Human Papillomavirus
ATHTCWTY

SEQ ID NO: 30993 - protein, 9 aa, Artificial Sequence
  Peptide Derived from Human Papillomavirus
DCAVMCRHY

SEQ ID NO: 30994 - protein, 10 aa, Artificial Sequence
  Peptide Derived from Human Papillomavirus
DDATHTCWTY

SEQ ID NO: 30995 - protein, 9 aa, Artificial Sequence
  Peptide Derived from Human Papillomavirus
DESDMAFQY

SEQ ID NO: 30996 - protein, 10 aa, Artificial Sequence
  Peptide Derived from Human Papillomavirus
DPAKDNKWPY

SEQ ID NO: 30997 - protein, 8 aa, Artificial Sequence
  Peptide Derived from Human Papillomavirus
ESDMAFQY

SEQ ID NO: 30998 - protein, 8 aa, Artificial Sequence
  Peptide Derived from Human Papillomavirus
FTISDSGY

SEQ ID NO: 30999 - protein, 9 aa, Artificial Sequence
  Peptide Derived from Human Papillomavirus
GPANTGKSY

SEQ ID NO: 31000 - protein, 11 aa, Artificial Sequence
  Peptide Derived from Human Papillomavirus
GTPKKNCILLY

SEQ ID NO: 31001 - protein, 10 aa, Artificial Sequence
  Peptide Derived from Human Papillomavirus
HTCWTYFDNY

SEQ ID NO: 31002 - protein, 8 aa, Artificial Sequence
  Peptide Derived from Human Papillomavirus
KSNCQAKY

SEQ ID NO: 31003 - protein, 10 aa, Artificial Sequence
  Peptide Derived from Human Papillomavirus
KTLIKPATLY

SEQ ID NO: 31004 - protein, 11 aa, Artificial Sequence
  Peptide Derived from Human Papillomavirus
LDDATHTCWTY

SEQ ID NO: 31005 - protein, 11 aa, Artificial Sequence
  Peptide Derived from Human Papillomavirus
LKDCAVMCRHY

SEQ ID NO: 31006 - protein, 9 aa, Artificial Sequence
  Peptide Derived from Human Papillomavirus
LKSNCQAKY

SEQ ID NO: 31007 - protein, 9 aa, Artificial Sequence
  Peptide Derived from Human Papillomavirus
LRSSVAALY

SEQ ID NO: 31008 - protein, 11 aa, Artificial Sequence
  Peptide Derived from Human Papillomavirus
LRSSVAALYWY

SEQ ID NO: 31009 - protein, 11 aa, Artificial Sequence
  Peptide Derived from Human Papillomavirus
LTDESDMAFQY

SEQ ID NO: 31010 - protein, 9 aa, Artificial Sequence
  Peptide Derived from Human Papillomavirus
MLAVFKDIY

SEQ ID NO: 31011 - protein, 8 aa, Artificial Sequence
  Peptide Derived from Human Papillomavirus
NMSQWIKY

SEQ ID NO: 31012 - protein, 10 aa, Artificial Sequence
  Peptide Derived from Human Papillomavirus
PFDKNGNPVY

SEQ ID NO: 31013 - protein, 10 aa, Artificial Sequence
  Peptide Derived from Human Papillomavirus
QMNMSQWIKY

SEQ ID NO: 31014 - protein, 8 aa, Artificial Sequence
  Peptide Derived from Human Papillomavirus
RSSVAALY

SEQ ID NO: 31015 - protein, 10 aa, Artificial Sequence
  Peptide Derived from Human Papillomavirus
RSSVAALYWY

SEQ ID NO: 31016 - protein, 9 aa, Artificial Sequence
  Peptide Derived from Human Papillomavirus
SSVAALYWY

SEQ ID NO: 31017 - protein, 8 aa, Artificial Sequence
  Peptide Derived from Human Papillomavirus
SVAALYWY

SEQ ID NO: 31018 - protein, 10 aa, Artificial Sequence
  Peptide Derived from Human Papillomavirus
TDESDMAFQY

SEQ ID NO: 31019 - protein, 11 aa, Artificial Sequence
  Peptide Derived from Human Papillomavirus
CMNYVVWDSIY

SEQ ID NO: 31020 - protein, 8 aa, Artificial Sequence
  Peptide Derived from Human Papillomavirus
CVSYWGVY

SEQ ID NO: 31021 - protein, 9 aa, Artificial Sequence
  Peptide Derived from Human Papillomavirus
CVSYWGVYY

SEQ ID NO: 31022 - protein, 11 aa, Artificial Sequence
  Peptide Derived from Human Papillomavirus
DSKDINSQISY

SEQ ID NO: 31023 - protein, 8 aa, Artificial Sequence
  Peptide Derived from Human Papillomavirus
FKSECEKY

SEQ ID NO: 31024 - protein, 10 aa, Artificial Sequence
  Peptide Derived from Human Papillomavirus
GNSNTWEVQY

SEQ ID NO: 31025 - protein, 8 aa, Artificial Sequence
  Peptide Derived from Human Papillomavirus
IKDGDTTY

SEQ ID NO: 31026 - protein, 9 aa, Artificial Sequence
  Peptide Derived from Human Papillomavirus
IKDGDTTYY

SEQ ID NO: 31027 - protein, 11 aa, Artificial Sequence
  Peptide Derived from Human Papillomavirus
IWDKTAACVSY

SEQ ID NO: 31028 - protein, 9 aa, Artificial Sequence
  Peptide Derived from Human Papillomavirus
KNSLKCLRY

SEQ ID NO: 31029 - protein, 8 aa, Artificial Sequence
  Peptide Derived from Human Papillomavirus
KTAACVSY

SEQ ID NO: 31030 - protein, 9 aa, Artificial Sequence
  Peptide Derived from Human Papillomavirus
LQDKILDHY

SEQ ID NO: 31031 - protein, 8 aa, Artificial Sequence
  Peptide Derived from Human Papillomavirus
NKDNCMNY

SEQ ID NO: 31032 - protein, 8 aa, Artificial Sequence
  Peptide Derived from Human Papillomavirus
NSLKCLRY

SEQ ID NO: 31033 - protein, 9 aa, Artificial Sequence
  Peptide Derived from Human Papillomavirus
NSNTWEVQY

SEQ ID NO: 31034 - protein, 9 aa, Artificial Sequence
  Peptide Derived from Human Papillomavirus
NSVQISVGY

SEQ ID NO: 31035 - protein, 9 aa, Artificial Sequence
  Peptide Derived from Human Papillomavirus
NTGILTVTY

SEQ ID NO: 31036 - protein, 10 aa, Artificial Sequence
  Peptide Derived from Human Papillomavirus
PNSVQISVGY

SEQ ID NO: 31037 - protein, 10 aa, Artificial Sequence
  Peptide Derived from Human Papillomavirus
SKDINSQISY

SEQ ID NO: 31038 - protein, 11 aa, Artificial Sequence
  Peptide Derived from Human Papillomavirus
TAACVSYWGVY

SEQ ID NO: 31039 - protein, 8 aa, Artificial Sequence
  Peptide Derived from Human Papillomavirus
VSYWGVYY

SEQ ID NO: 31040 - protein, 9 aa, Artificial Sequence
  Peptide Derived from Human Papillomavirus
ATLERTEVY

SEQ ID NO: 31041 - protein, 11 aa, Artificial Sequence
  Peptide Derived from Human Papillomavirus
CKATLERTEVY

SEQ ID NO: 31042 - protein, 8 aa, Artificial Sequence
  Peptide Derived from Human Papillomavirus
DVSIACVY

SEQ ID NO: 31043 - protein, 9 aa, Artificial Sequence
  Peptide Derived from Human Papillomavirus
FDDPTQRPY

SEQ ID NO: 31044 - protein, 8 aa, Artificial Sequence
  Peptide Derived from Human Papillomavirus
FHSIAGQY

SEQ ID NO: 31045 - protein, 8 aa, Artificial Sequence
  Peptide Derived from Human Papillomavirus
FKDLFIVY

SEQ ID NO: 31046 - protein, 10 aa, Artificial Sequence
  Peptide Derived from Human Papillomavirus
FYSRIRELRY

SEQ ID NO: 31047 - protein, 11 aa, Artificial Sequence
  Peptide Derived from Human Papillomavirus
FYSRIRELRYY

SEQ ID NO: 31048 - protein, 10 aa, Artificial Sequence
  Peptide Derived from Human Papillomavirus
LQDVSIACVY

SEQ ID NO: 31049 - protein, 11 aa, Artificial Sequence
  Peptide Derived from Human Papillomavirus
QFAFKDLFIVY

SEQ ID NO: 31050 - protein, 10 aa, Artificial Sequence
  Peptide Derived from Human Papillomavirus
RFDDPTQRPY

SEQ ID NO: 31051 - protein, 11 aa, Artificial Sequence
  Peptide Derived from Human Papillomavirus
TLEKITNTELY

SEQ ID NO: 31052 - protein, 8 aa, Artificial Sequence
  Peptide Derived from Human Papillomavirus
TLERTEVY

SEQ ID NO: 31053 - protein, 11 aa, Artificial Sequence
  Peptide Derived from Human Papillomavirus
YAACHKCIDFY

SEQ ID NO: 31054 - protein, 9 aa, Artificial Sequence
  Peptide Derived from Human Papillomavirus
YSRIRELRY

SEQ ID NO: 31055 - protein, 10 aa, Artificial Sequence
  Peptide Derived from Human Papillomavirus
YSRIRELRYY

SEQ ID NO: 31056 - protein, 10 aa, Artificial Sequence
  Peptide Derived from Human Papillomavirus
ELDPVDLLCY

SEQ ID NO: 31057 - protein, 11 aa, Artificial Sequence
  Peptide Derived from Human Papillomavirus
ASTQNPVPNTY

SEQ ID NO: 31058 - protein, 10 aa, Artificial Sequence
  Peptide Derived from Human Papillomavirus
CQSICKYPDY

SEQ ID NO: 31059 - protein, 9 aa, Artificial Sequence
  Peptide Derived from Human Papillomavirus
DGDMVDTGY

SEQ ID NO: 31060 - protein, 9 aa, Artificial Sequence
  Peptide Derived from Human Papillomavirus
DSQLFNKPY

SEQ ID NO: 31061 - protein, 11 aa, Artificial Sequence
  Peptide Derived from Human Papillomavirus
DTTPPEKQDPY

SEQ ID NO: 31062 - protein, 8 aa, Artificial Sequence
  Peptide Derived from Human Papillomavirus
DTVPTDLY

SEQ ID NO: 31063 - protein, 8 aa, Artificial Sequence
  Peptide Derived from Human Papillomavirus
ETPGSCVY

SEQ ID NO: 31064 - protein, 8 aa, Artificial Sequence
  Peptide Derived from Human Papillomavirus
FSSDLDQY

SEQ ID NO: 31065 - protein, 8 aa, Artificial Sequence
  Peptide Derived from Human Papillomavirus
GLSGHPFY

SEQ ID NO: 31066 - protein, 9 aa, Artificial Sequence
  Peptide Derived from Human Papillomavirus
HYSRHVEEY

SEQ ID NO: 31067 - protein, 11 aa, Artificial Sequence
  Peptide Derived from Human Papillomavirus
IEDGDMVDTGY

SEQ ID NO: 31068 - protein, 10 aa, Artificial Sequence
  Peptide Derived from Human Papillomavirus
ITLTAEVMSY

SEQ ID NO: 31069 - protein, 9 aa, Artificial Sequence
  Peptide Derived from Human Papillomavirus
KFSSDLDQY

SEQ ID NO: 31070 - protein, 10 aa, Artificial Sequence
  Peptide Derived from Human Papillomavirus
KQAVPKVSAY

SEQ ID NO: 31071 - protein, 8 aa, Artificial Sequence
  Peptide Derived from Human Papillomavirus
LTAEVMSY

SEQ ID NO: 31072 - protein, 10 aa, Artificial Sequence
  Peptide Derived from Human Papillomavirus
MGDTVPTDLY

SEQ ID NO: 31073 - protein, 10 aa, Artificial Sequence
  Peptide Derived from Human Papillomavirus
MRETPGSCVY

SEQ ID NO: 31074 - protein, 11 aa, Artificial Sequence
  Peptide Derived from Human Papillomavirus
NMRETPGSCVY

SEQ ID NO: 31075 - protein, 11 aa, Artificial Sequence
  Peptide Derived from Human Papillomavirus
NTYDPTKFKHY

SEQ ID NO: 31076 - protein, 11 aa, Artificial Sequence
  Peptide Derived from Human Papillomavirus
PLDICQSICKY

SEQ ID NO: 31077 - protein, 8 aa, Artificial Sequence
  Peptide Derived from Human Papillomavirus
PPEKQDPY

SEQ ID NO: 31078 - protein, 9 aa, Artificial Sequence
  Peptide Derived from Human Papillomavirus
PTTSLVDTY

SEQ ID NO: 31079 - protein, 9 aa, Artificial Sequence
  Peptide Derived from Human Papillomavirus
QSICKYPDY

SEQ ID NO: 31080 - protein, 8 aa, Artificial Sequence
  Peptide Derived from Human Papillomavirus
RPSDSTVY

SEQ ID NO: 31081 - protein, 10 aa, Artificial Sequence
  Peptide Derived from Human Papillomavirus
SDSQLFNKPY

SEQ ID NO: 31082 - protein, 11 aa, Artificial Sequence
  Peptide Derived from Human Papillomavirus
SSRLLTVGNPY

SEQ ID NO: 31083 - protein, 10 aa, Artificial Sequence
  Peptide Derived from Human Papillomavirus
STQNPVPNTY

SEQ ID NO: 31084 - protein, 11 aa, Artificial Sequence
  Peptide Derived from Human Papillomavirus
SVARVVNTDDY

SEQ ID NO: 31085 - protein, 11 aa, Artificial Sequence
  Peptide Derived from Human Papillomavirus
TSDSQLFNKPY

SEQ ID NO: 31086 - protein, 10 aa, Artificial Sequence
  Peptide Derived from Human Papillomavirus
TTPPEKQDPY

SEQ ID NO: 31087 - protein, 8 aa, Artificial Sequence
  Peptide Derived from Human Papillomavirus
TTSLVDTY

SEQ ID NO: 31088 - protein, 10 aa, Artificial Sequence
  Peptide Derived from Human Papillomavirus
TYDPTKFKHY

SEQ ID NO: 31089 - protein, 11 aa, Artificial Sequence
  Peptide Derived from Human Papillomavirus
VMGDTVPTDLY

SEQ ID NO: 31090 - protein, 9 aa, Artificial Sequence
  Peptide Derived from Human Papillomavirus
VRDNVSVDY

SEQ ID NO: 31091 - protein, 8 aa, Artificial Sequence
  Peptide Derived from Human Papillomavirus
VSRTSIFY

SEQ ID NO: 31092 - protein, 8 aa, Artificial Sequence
  Peptide Derived from Human Papillomavirus
YSRHVEEY

SEQ ID NO: 31093 - protein, 9 aa, Artificial Sequence
  Peptide Derived from Human Papillomavirus
YVSRTSIFY

SEQ ID NO: 31094 - protein, 11 aa, Artificial Sequence
  Peptide Derived from Human Papillomavirus
ATNDSDLFDVY

SEQ ID NO: 31095 - protein, 8 aa, Artificial Sequence
  Peptide Derived from Human Papillomavirus
DSDLFDVY

SEQ ID NO: 31096 - protein, 8 aa, Artificial Sequence
  Peptide Derived from Human Papillomavirus
GSGGRTGY

SEQ ID NO: 31097 - protein, 10 aa, Artificial Sequence
  Peptide Derived from Human Papillomavirus
GSGSGGRTGY

SEQ ID NO: 31098 - protein, 10 aa, Artificial Sequence
  Peptide Derived from Human Papillomavirus
GTPTSGSHGY

SEQ ID NO: 31099 - protein, 10 aa, Artificial Sequence
  Peptide Derived from Human Papillomavirus
GTQYYLWPWY

SEQ ID NO: 31100 - protein, 11 aa, Artificial Sequence
  Peptide Derived from Human Papillomavirus
GTQYYLWPWYY

SEQ ID NO: 31101 - protein, 9 aa, Artificial Sequence
  Peptide Derived from Human Papillomavirus
HKSFTYPKY

SEQ ID NO: 31102 - protein, 9 aa, Artificial Sequence
  Peptide Derived from Human Papillomavirus
KRASATDLY

SEQ ID NO: 31103 - protein, 8 aa, Artificial Sequence
  Peptide Derived from Human Papillomavirus
KSFTYPKY

SEQ ID NO: 31104 - protein, 11 aa, Artificial Sequence
  Peptide Derived from Human Papillomavirus
LTMPSTAASSY

SEQ ID NO: 31105 - protein, 10 aa, Artificial Sequence
  Peptide Derived from Human Papillomavirus
LTSAWDVPIY

SEQ ID NO: 31106 - protein, 9 aa, Artificial Sequence
  Peptide Derived from Human Papillomavirus
MPSTAASSY

SEQ ID NO: 31107 - protein, 9 aa, Artificial Sequence
  Peptide Derived from Human Papillomavirus
NDSDLFDVY

SEQ ID NO: 31108 - protein, 8 aa, Artificial Sequence
  Peptide Derived from Human Papillomavirus
PSTAASSY

SEQ ID NO: 31109 - protein, 10 aa, Artificial Sequence
  Peptide Derived from Human Papillomavirus
PSTIHKSFTY

SEQ ID NO: 31110 - protein, 9 aa, Artificial Sequence
  Peptide Derived from Human Papillomavirus
PTNASTTTY

SEQ ID NO: 31111 - protein, 8 aa, Artificial Sequence
  Peptide Derived from Human Papillomavirus
PTSGSHGY

SEQ ID NO: 31112 - protein, 8 aa, Artificial Sequence
  Peptide Derived from Human Papillomavirus
RASATDLY

SEQ ID NO: 31113 - protein, 9 aa, Artificial Sequence
  Peptide Derived from Human Papillomavirus
SGSGGRTGY

SEQ ID NO: 31114 - protein, 11 aa, Artificial Sequence
  Peptide Derived from Human Papillomavirus
SSLVTFDNPAY

SEQ ID NO: 31115 - protein, 9 aa, Artificial Sequence
  Peptide Derived from Human Papillomavirus
STIHKSFTY

SEQ ID NO: 31116 - protein, 11 aa, Artificial Sequence
  Peptide Derived from Human Papillomavirus
TGSGSGGRTGY

SEQ ID NO: 31117 - protein, 10 aa, Artificial Sequence
  Peptide Derived from Human Papillomavirus
TMPSTAASSY

SEQ ID NO: 31118 - protein, 8 aa, Artificial Sequence
  Peptide Derived from Human Papillomavirus
TNASTTTY

SEQ ID NO: 31119 - protein, 10 aa, Artificial Sequence
  Peptide Derived from Human Papillomavirus
TNDSDLFDVY

SEQ ID NO: 31120 - protein, 11 aa, Artificial Sequence
  Peptide Derived from Human Papillomavirus
TPSTIHKSFTY

SEQ ID NO: 31121 - protein, 9 aa, Artificial Sequence
  Peptide Derived from Human Papillomavirus
TSAWDVPIY

SEQ ID NO: 31122 - protein, 11 aa, Artificial Sequence
  Peptide Derived from Human Papillomavirus
TSPTNASTTTY

SEQ ID NO: 31123 - protein, 11 aa, Artificial Sequence
  Peptide Derived from Human Papillomavirus
TTYIGIHGTQY

SEQ ID NO: 31124 - protein, 8 aa, Artificial Sequence
  Peptide Derived from Human Papillomavirus
VTFDNPAY

SEQ ID NO: 31125 - protein, 10 aa, Artificial Sequence
  Peptide Derived from Human Papillomavirus
ALESLSTTIY

SEQ ID NO: 31126 - protein, 9 aa, Artificial Sequence
  Peptide Derived from Human Papillomavirus
CMQYVAWKY

SEQ ID NO: 31127 - protein, 11 aa, Artificial Sequence
  Peptide Derived from Human Papillomavirus
CMQYVAWKYIY

SEQ ID NO: 31128 - protein, 11 aa, Artificial Sequence
  Peptide Derived from Human Papillomavirus
CPDSVSSTCRY

SEQ ID NO: 31129 - protein, 10 aa, Artificial Sequence
  Peptide Derived from Human Papillomavirus
CSGVDYRGIY

SEQ ID NO: 31130 - protein, 11 aa, Artificial Sequence
  Peptide Derived from Human Papillomavirus
CSGVDYRGIYY

SEQ ID NO: 31131 - protein, 10 aa, Artificial Sequence
  Peptide Derived from Human Papillomavirus
DGSKNNCMQY

SEQ ID NO: 31132 - protein, 9 aa, Artificial Sequence
  Peptide Derived from Human Papillomavirus
DSVSSTCRY

SEQ ID NO: 31133 - protein, 8 aa, Artificial Sequence
  Peptide Derived from Human Papillomavirus
ESLSTTIY

SEQ ID NO: 31134 - protein, 11 aa, Artificial Sequence
  Peptide Derived from Human Papillomavirus
FLSHVKIPVVY

SEQ ID NO: 31135 - protein, 8 aa, Artificial Sequence
  Peptide Derived from Human Papillomavirus
FVDVTSTY

SEQ ID NO: 31136 - protein, 9 aa, Artificial Sequence
  Peptide Derived from Human Papillomavirus
GSKNNCMQY

SEQ ID NO: 31137 - protein, 8 aa, Artificial Sequence
  Peptide Derived from Human Papillomavirus
GVDYRGIY

SEQ ID NO: 31138 - protein, 9 aa, Artificial Sequence
  Peptide Derived from Human Papillomavirus
GVDYRGIYY

SEQ ID NO: 31139 - protein, 8 aa, Artificial Sequence
  Peptide Derived from Human Papillomavirus
HMENESIY

SEQ ID NO: 31140 - protein, 11 aa, Artificial Sequence
  Peptide Derived from Human Papillomavirus
KTLFVDVTSTY

SEQ ID NO: 31141 - protein, 9 aa, Artificial Sequence
  Peptide Derived from Human Papillomavirus
LESLSTTIY

SEQ ID NO: 31142 - protein, 10 aa, Artificial Sequence
  Peptide Derived from Human Papillomavirus
LSHVKIPVVY

SEQ ID NO: 31143 - protein, 11 aa, Artificial Sequence
  Peptide Derived from Human Papillomavirus
NVSPVETVNEY

SEQ ID NO: 31144 - protein, 9 aa, Artificial Sequence
  Peptide Derived from Human Papillomavirus
NYSIITIIY

SEQ ID NO: 31145 - protein, 10 aa, Artificial Sequence
  Peptide Derived from Human Papillomavirus
PDSVSSTCRY

SEQ ID NO: 31146 - protein, 8 aa, Artificial Sequence
  Peptide Derived from Human Papillomavirus
PVETVNEY

SEQ ID NO: 31147 - protein, 8 aa, Artificial Sequence
  Peptide Derived from Human Papillomavirus
SVSSTCRY

SEQ ID NO: 31148 - protein, 8 aa, Artificial Sequence
  Peptide Derived from Human Papillomavirus
TSTDNKNY

SEQ ID NO: 31149 - protein, 11 aa, Artificial Sequence
  Peptide Derived from Human Papillomavirus
VCSGVDYRGIY

SEQ ID NO: 31150 - protein, 8 aa, Artificial Sequence
  Peptide Derived from Human Papillomavirus
VHDGHKTY

SEQ ID NO: 31151 - protein, 9 aa, Artificial Sequence
  Peptide Derived from Human Papillomavirus
VHDGHKTYY

SEQ ID NO: 31152 - protein, 10 aa, Artificial Sequence
  Peptide Derived from Human Papillomavirus
VSPVETVNEY

SEQ ID NO: 31153 - protein, 9 aa, Artificial Sequence
  Peptide Derived from Human Papillomavirus
WTSTDNKNY

SEQ ID NO: 31154 - protein, 8 aa, Artificial Sequence
  Peptide Derived from Human Papillomavirus
YSIITIIY

SEQ ID NO: 31155 - protein, 8 aa, Artificial Sequence
  Peptide Derived from Human Papillomavirus
YVAWKYIY

SEQ ID NO: 31156 - protein, 9 aa, Artificial Sequence
  Peptide Derived from Human Papillomavirus
YVAWKYIYY

SEQ ID NO: 31157 - protein, 8 aa, Artificial Sequence
  Peptide Derived from Human Papillomavirus
CTELKLVY

SEQ ID NO: 31158 - protein, 8 aa, Artificial Sequence
  Peptide Derived from Human Papillomavirus
FYSKVRKY

SEQ ID NO: 31159 - protein, 10 aa, Artificial Sequence
  Peptide Derived from Human Papillomavirus
FYSKVRKYRY

SEQ ID NO: 31160 - protein, 11 aa, Artificial Sequence
  Peptide Derived from Human Papillomavirus
FYSKVRKYRYY

SEQ ID NO: 31161 - protein, 10 aa, Artificial Sequence
  Peptide Derived from Human Papillomavirus
KKELTRAEVY

SEQ ID NO: 31162 - protein, 9 aa, Artificial Sequence
  Peptide Derived from Human Papillomavirus
LCDLLIRCY

SEQ ID NO: 31163 - protein, 10 aa, Artificial Sequence
  Peptide Derived from Human Papillomavirus
LIDLRLSCVY

SEQ ID NO: 31164 - protein, 11 aa, Artificial Sequence
  Peptide Derived from Human Papillomavirus
NFACTELKLVY

SEQ ID NO: 31165 - protein, 9 aa, Artificial Sequence
  Peptide Derived from Human Papillomavirus
YSKVRKYRY

SEQ ID NO: 31166 - protein, 10 aa, Artificial Sequence
  Peptide Derived from Human Papillomavirus
YSKVRKYRYY

SEQ ID NO: 31167 - protein, 9 aa, Artificial Sequence
  Peptide Derived from Human Papillomavirus
RQAKQHTCY

SEQ ID NO: 31168 - protein, 11 aa, Artificial Sequence
  Peptide Derived from Human Papillomavirus
ADAYGDSMWFY

SEQ ID NO: 31169 - protein, 8 aa, Artificial Sequence
  Peptide Derived from Human Papillomavirus
ATEQLSKY

SEQ ID NO: 31170 - protein, 8 aa, Artificial Sequence
  Peptide Derived from Human Papillomavirus
ATSLEDKY

SEQ ID NO: 31171 - protein, 10 aa, Artificial Sequence
  Peptide Derived from Human Papillomavirus
ATSLEDKYRY

SEQ ID NO: 31172 - protein, 11 aa, Artificial Sequence
  Peptide Derived from Human Papillomavirus
ATWRPSENKVY

SEQ ID NO: 31173 - protein, 11 aa, Artificial Sequence
  Peptide Derived from Human Papillomavirus
DSYVKRTSIFY

SEQ ID NO: 31174 - protein, 8 aa, Artificial Sequence
  Peptide Derived from Human Papillomavirus
ETIPAELY

SEQ ID NO: 31175 - protein, 10 aa, Artificial Sequence
  Peptide Derived from Human Papillomavirus
GREPPPSSVY

SEQ ID NO: 31176 - protein, 11 aa, Artificial Sequence
  Peptide Derived from Human Papillomavirus
ISTATEQLSKY

SEQ ID NO: 31177 - protein, 10 aa, Artificial Sequence
  Peptide Derived from Human Papillomavirus
ITLSAEVMAY

SEQ ID NO: 31178 - protein, 8 aa, Artificial Sequence
  Peptide Derived from Human Papillomavirus
KQDPLAKY

SEQ ID NO: 31179 - protein, 10 aa, Artificial Sequence
  Peptide Derived from Human Papillomavirus
KTNIPKVSAY

SEQ ID NO: 31180 - protein, 10 aa, Artificial Sequence
  Peptide Derived from Human Papillomavirus
KYDARKINQY

SEQ ID NO: 31181 - protein, 8 aa, Artificial Sequence
  Peptide Derived from Human Papillomavirus
LLAVGHPY

SEQ ID NO: 31182 - protein, 9 aa, Artificial Sequence
  Peptide Derived from Human Papillomavirus
LLAVGHPYY

SEQ ID NO: 31183 - protein, 8 aa, Artificial Sequence
  Peptide Derived from Human Papillomavirus
LSAEVMAY

SEQ ID NO: 31184 - protein, 9 aa, Artificial Sequence
  Peptide Derived from Human Papillomavirus
MMLPMMYIY

SEQ ID NO: 31185 - protein, 11 aa, Artificial Sequence
  Peptide Derived from Human Papillomavirus
PLDIVQSTCKY

SEQ ID NO: 31186 - protein, 11 aa, Artificial Sequence
  Peptide Derived from Human Papillomavirus
PTEKQDPLAKY

SEQ ID NO: 31187 - protein, 10 aa, Artificial Sequence
  Peptide Derived from Human Papillomavirus
PVATSLEDKY

SEQ ID NO: 31188 - protein, 11 aa, Artificial Sequence
  Peptide Derived from Human Papillomavirus
PVSKVVATDSY

SEQ ID NO: 31189 - protein, 9 aa, Artificial Sequence
  Peptide Derived from Human Papillomavirus
QSTCKYPDY

SEQ ID NO: 31190 - protein, 8 aa, Artificial Sequence
  Peptide Derived from Human Papillomavirus
RPSENKVY

SEQ ID NO: 31191 - protein, 10 aa, Artificial Sequence
  Peptide Derived from Human Papillomavirus
RREQLFARHY

SEQ ID NO: 31192 - protein, 10 aa, Artificial Sequence
  Peptide Derived from Human Papillomavirus
SEAQLFNKPY

SEQ ID NO: 31193 - protein, 8 aa, Artificial Sequence
  Peptide Derived from Human Papillomavirus
SLEDKYRY

SEQ ID NO: 31194 - protein, 11 aa, Artificial Sequence
  Peptide Derived from Human Papillomavirus
SSRLLAVGHPY

SEQ ID NO: 31195 - protein, 10 aa, Artificial Sequence
  Peptide Derived from Human Papillomavirus
STATEQLSKY

SEQ ID NO: 31196 - protein, 8 aa, Artificial Sequence
  Peptide Derived from Human Papillomavirus
STCKYPDY

SEQ ID NO: 31197 - protein, 9 aa, Artificial Sequence
  Peptide Derived from Human Papillomavirus
TLSAEVMAY

SEQ ID NO: 31198 - protein, 11 aa, Artificial Sequence
  Peptide Derived from Human Papillomavirus
TSEAQLFNKPY

SEQ ID NO: 31199 - protein, 9 aa, Artificial Sequence
  Peptide Derived from Human Papillomavirus
TSLEDKYRY

SEQ ID NO: 31200 - protein, 10 aa, Artificial Sequence
  Peptide Derived from Human Papillomavirus
VGETIPAELY

SEQ ID NO: 31201 - protein, 10 aa, Artificial Sequence
  Peptide Derived from Human Papillomavirus
VQSTCKYPDY

SEQ ID NO: 31202 - protein, 10 aa, Artificial Sequence
  Peptide Derived from Human Papillomavirus
VSKVVATDSY

SEQ ID NO: 31203 - protein, 9 aa, Artificial Sequence
  Peptide Derived from Human Papillomavirus
YDARKINQY

SEQ ID NO: 31204 - protein, 8 aa, Artificial Sequence
  Peptide Derived from Human Papillomavirus
YGDSMWFY

SEQ ID NO: 31205 - protein, 8 aa, Artificial Sequence
  Peptide Derived from Human Papillomavirus
YRDPPLHY

SEQ ID NO: 31206 - protein, 8 aa, Artificial Sequence
  Peptide Derived from Human Papillomavirus
GSGGRAGY

SEQ ID NO: 31207 - protein, 10 aa, Artificial Sequence
  Peptide Derived from Human Papillomavirus
GSSFALWPVY

SEQ ID NO: 31208 - protein, 10 aa, Artificial Sequence
  Peptide Derived from Human Papillomavirus
GTGSGGRAGY

SEQ ID NO: 31209 - protein, 10 aa, Artificial Sequence
  Peptide Derived from Human Papillomavirus
GTQIGARVHY

SEQ ID NO: 31210 - protein, 11 aa, Artificial Sequence
  Peptide Derived from Human Papillomavirus
GTQIGARVHYY

SEQ ID NO: 31211 - protein, 8 aa, Artificial Sequence
  Peptide Derived from Human Papillomavirus
IGARVHYY

SEQ ID NO: 31212 - protein, 9 aa, Artificial Sequence
  Peptide Derived from Human Papillomavirus
IGARVHYYY

SEQ ID NO: 31213 - protein, 11 aa, Artificial Sequence
  Peptide Derived from Human Papillomavirus
ISTPTSGIHSY

SEQ ID NO: 31214 - protein, 9 aa, Artificial Sequence
  Peptide Derived from Human Papillomavirus
KRASATQLY

SEQ ID NO: 31215 - protein, 11 aa, Artificial Sequence
  Peptide Derived from Human Papillomavirus
LSANNSFDGLY

SEQ ID NO: 31216 - protein, 8 aa, Artificial Sequence
  Peptide Derived from Human Papillomavirus
NNSFDGLY

SEQ ID NO: 31217 - protein, 11 aa, Artificial Sequence
  Peptide Derived from Human Papillomavirus
NNSFDGLYDIY

SEQ ID NO: 31218 - protein, 10 aa, Artificial Sequence
  Peptide Derived from Human Papillomavirus
NSFDGLYDIY

SEQ ID NO: 31219 - protein, 8 aa, Artificial Sequence
  Peptide Derived from Human Papillomavirus
PTSGIHSY

SEQ ID NO: 31220 - protein, 9 aa, Artificial Sequence
  Peptide Derived from Human Papillomavirus
PYDVTHDVY

SEQ ID NO: 31221 - protein, 11 aa, Artificial Sequence
  Peptide Derived from Human Papillomavirus
QGSSFALWPVY

SEQ ID NO: 31222 - protein, 11 aa, Artificial Sequence
  Peptide Derived from Human Papillomavirus
QSPYDVTHDVY

SEQ ID NO: 31223 - protein, 8 aa, Artificial Sequence
  Peptide Derived from Human Papillomavirus
RASATQLY

SEQ ID NO: 31224 - protein, 8 aa, Artificial Sequence
  Peptide Derived from Human Papillomavirus
RIAAPRLY

SEQ ID NO: 31225 - protein, 8 aa, Artificial Sequence
  Peptide Derived from Human Papillomavirus
SFALWPVY

SEQ ID NO: 31226 - protein, 9 aa, Artificial Sequence
  Peptide Derived from Human Papillomavirus
SFDGLYDIY

SEQ ID NO: 31227 - protein, 9 aa, Artificial Sequence
  Peptide Derived from Human Papillomavirus
SSFALWPVY

SEQ ID NO: 31228 - protein, 10 aa, Artificial Sequence
  Peptide Derived from Human Papillomavirus
STPTSGIHSY

SEQ ID NO: 31229 - protein, 11 aa, Artificial Sequence
  Peptide Derived from Human Papillomavirus
STWPFVPQSPY

SEQ ID NO: 31230 - protein, 9 aa, Artificial Sequence
  Peptide Derived from Human Papillomavirus
TGSGGRAGY

SEQ ID NO: 31231 - protein, 8 aa, Artificial Sequence
  Peptide Derived from Human Papillomavirus
AAALYWYK

SEQ ID NO: 31232 - protein, 10 aa, Artificial Sequence
  Peptide Derived from Human Papillomavirus
AAFGLTPSIA

SEQ ID NO: 31233 - protein, 8 aa, Artificial Sequence
  Peptide Derived from Human Papillomavirus
AAMLAKFK

SEQ ID NO: 31234 - protein, 11 aa, Artificial Sequence
  Peptide Derived from Human Papillomavirus
AAMLAKFKELY

SEQ ID NO: 31235 - protein, 9 aa, Artificial Sequence
  Peptide Derived from Human Papillomavirus
AANTGKSLF

SEQ ID NO: 31236 - protein, 11 aa, Artificial Sequence
  Peptide Derived from Human Papillomavirus
ADAKIGMLDDA

SEQ ID NO: 31237 - protein, 11 aa, Artificial Sequence
  Peptide Derived from Human Papillomavirus
ADSIKTLLQQY

SEQ ID NO: 31238 - protein, 9 aa, Artificial Sequence
  Peptide Derived from Human Papillomavirus
ADTNSNASA

SEQ ID NO: 31239 - protein, 10 aa, Artificial Sequence
  Peptide Derived from Human Papillomavirus
ADTNSNASAF

SEQ ID NO: 31240 - protein, 9 aa, Artificial Sequence
  Peptide Derived from Human Papillomavirus
AFGLTPSIA

SEQ ID NO: 31241 - protein, 9 aa, Artificial Sequence
  Peptide Derived from Human Papillomavirus
AFLKSNSQA

SEQ ID NO: 31242 - protein, 10 aa, Artificial Sequence
  Peptide Derived from Human Papillomavirus
AFLKSNSQAK

SEQ ID NO: 31243 - protein, 9 aa, Artificial Sequence
  Peptide Derived from Human Papillomavirus
AGTDSRWPY

SEQ ID NO: 31244 - protein, 11 aa, Artificial Sequence
  Peptide Derived from Human Papillomavirus
AGTDSRWPYLH

SEQ ID NO: 31245 - protein, 9 aa, Artificial Sequence
  Peptide Derived from Human Papillomavirus
AICIEKQSR

SEQ ID NO: 31246 - protein, 10 aa, Artificial Sequence
  Peptide Derived from Human Papillomavirus
AICIEKQSRA

SEQ ID NO: 31247 - protein, 11 aa, Artificial Sequence
  Peptide Derived from Human Papillomavirus
AICIEKQSRAA

SEQ ID NO: 31248 - protein, 8 aa, Artificial Sequence
  Peptide Derived from Human Papillomavirus
ALFTAQEA

SEQ ID NO: 31249 - protein, 9 aa, Artificial Sequence
  Peptide Derived from Human Papillomavirus
ALFTAQEAK

SEQ ID NO: 31250 - protein, 11 aa, Artificial Sequence
  Peptide Derived from Human Papillomavirus
ALFTAQEAKQH

SEQ ID NO: 31251 - protein, 11 aa, Artificial Sequence
  Peptide Derived from Human Papillomavirus
ALKRFLQGIPK

SEQ ID NO: 31252 - protein, 10 aa, Artificial Sequence
  Peptide Derived from Human Papillomavirus
AMLAKFKELY

SEQ ID NO: 31253 - protein, 11 aa, Artificial Sequence
  Peptide Derived from Human Papillomavirus
ASAFLKSNSQA

SEQ ID NO: 31254 - protein, 8 aa, Artificial Sequence
  Peptide Derived from Human Papillomavirus
ATMCRHYK

SEQ ID NO: 31255 - protein, 9 aa, Artificial Sequence
  Peptide Derived from Human Papillomavirus
ATMCRHYKR

SEQ ID NO: 31256 - protein, 10 aa, Artificial Sequence
  Peptide Derived from Human Papillomavirus
ATMCRHYKRA

SEQ ID NO: 31257 - protein, 8 aa, Artificial Sequence
  Peptide Derived from Human Papillomavirus
ATVPCWNY

SEQ ID NO: 31258 - protein, 8 aa, Artificial Sequence
  Peptide Derived from Human Papillomavirus
AVQVLKRK

SEQ ID NO: 31259 - protein, 9 aa, Artificial Sequence
  Peptide Derived from Human Papillomavirus
AVQVLKRKY

SEQ ID NO: 31260 - protein, 10 aa, Artificial Sequence
  Peptide Derived from Human Papillomavirus
AVVEKKTGDA

SEQ ID NO: 31261 - protein, 8 aa, Artificial Sequence
  Peptide Derived from Human Papillomavirus
CATMCRHY

SEQ ID NO: 31262 - protein, 9 aa, Artificial Sequence
  Peptide Derived from Human Papillomavirus
CATMCRHYK

SEQ ID NO: 31263 - protein, 10 aa, Artificial Sequence
  Peptide Derived from Human Papillomavirus
CATMCRHYKR

SEQ ID NO: 31264 - protein, 11 aa, Artificial Sequence
  Peptide Derived from Human Papillomavirus
CATMCRHYKRA

SEQ ID NO: 31265 - protein, 8 aa, Artificial Sequence
  Peptide Derived from Human Papillomavirus
CCDWCIAA

SEQ ID NO: 31266 - protein, 9 aa, Artificial Sequence
  Peptide Derived from Human Papillomavirus
CCDWCIAAF

SEQ ID NO: 31267 - protein, 11 aa, Artificial Sequence
  Peptide Derived from Human Papillomavirus
CDRVDDGGDWK

SEQ ID NO: 31268 - protein, 8 aa, Artificial Sequence
  Peptide Derived from Human Papillomavirus
CDWCIAAF

SEQ ID NO: 31269 - protein, 8 aa, Artificial Sequence
  Peptide Derived from Human Papillomavirus
CFVNSKSH

SEQ ID NO: 31270 - protein, 9 aa, Artificial Sequence
  Peptide Derived from Human Papillomavirus
CFVNSKSHF

SEQ ID NO: 31271 - protein, 10 aa, Artificial Sequence
  Peptide Derived from Human Papillomavirus
CGKNRETIEK

SEQ ID NO: 31272 - protein, 8 aa, Artificial Sequence
  Peptide Derived from Human Papillomavirus
CIEKQSRA

SEQ ID NO: 31273 - protein, 9 aa, Artificial Sequence
  Peptide Derived from Human Papillomavirus
CIEKQSRAA

SEQ ID NO: 31274 - protein, 10 aa, Artificial Sequence
  Peptide Derived from Human Papillomavirus
CIEKQSRAAK

SEQ ID NO: 31275 - protein, 11 aa, Artificial Sequence
  Peptide Derived from Human Papillomavirus
CIEKQSRAAKR

SEQ ID NO: 31276 - protein, 8 aa, Artificial Sequence
  Peptide Derived from Human Papillomavirus
CILLYGAA

SEQ ID NO: 31277 - protein, 10 aa, Artificial Sequence
  Peptide Derived from Human Papillomavirus
CLYLHIQSLA

SEQ ID NO: 31278 - protein, 8 aa, Artificial Sequence
  Peptide Derived from Human Papillomavirus
CMMIEPPK

SEQ ID NO: 31279 - protein, 10 aa, Artificial Sequence
  Peptide Derived from Human Papillomavirus
CMMIEPPKLR

SEQ ID NO: 31280 - protein, 9 aa, Artificial Sequence
  Peptide Derived from Human Papillomavirus
CVDNNISPR

SEQ ID NO: 31281 - protein, 11 aa, Artificial Sequence
  Peptide Derived from Human Papillomavirus
CVDNNISPRLK

SEQ ID NO: 31282 - protein, 10 aa, Artificial Sequence
  Peptide Derived from Human Papillomavirus
DAKIGMLDDA

SEQ ID NO: 31283 - protein, 9 aa, Artificial Sequence
  Peptide Derived from Human Papillomavirus
DATVPCWNY

SEQ ID NO: 31284 - protein, 8 aa, Artificial Sequence
  Peptide Derived from Human Papillomavirus
DAVQVLKR

SEQ ID NO: 31285 - protein, 9 aa, Artificial Sequence
  Peptide Derived from Human Papillomavirus
DAVQVLKRK

SEQ ID NO: 31286 - protein, 10 aa, Artificial Sequence
  Peptide Derived from Human Papillomavirus
DAVQVLKRKY

SEQ ID NO: 31287 - protein, 8 aa, Artificial Sequence
  Peptide Derived from Human Papillomavirus
DCATMCRH

SEQ ID NO: 31288 - protein, 9 aa, Artificial Sequence
  Peptide Derived from Human Papillomavirus
DCATMCRHY

SEQ ID NO: 31289 - protein, 10 aa, Artificial Sequence
  Peptide Derived from Human Papillomavirus
DCATMCRHYK

SEQ ID NO: 31290 - protein, 11 aa, Artificial Sequence
  Peptide Derived from Human Papillomavirus
DCATMCRHYKR

SEQ ID NO: 31291 - protein, 10 aa, Artificial Sequence
  Peptide Derived from Human Papillomavirus
DDATVPCWNY

SEQ ID NO: 31292 - protein, 8 aa, Artificial Sequence
  Peptide Derived from Human Papillomavirus
DDSEIAYK

SEQ ID NO: 31293 - protein, 9 aa, Artificial Sequence
  Peptide Derived from Human Papillomavirus
DDSEIAYKY

SEQ ID NO: 31294 - protein, 10 aa, Artificial Sequence
  Peptide Derived from Human Papillomavirus
DDSEIAYKYA

SEQ ID NO: 31295 - protein, 9 aa, Artificial Sequence
  Peptide Derived from Human Papillomavirus
DFIVNDNDY

SEQ ID NO: 31296 - protein, 8 aa, Artificial Sequence
  Peptide Derived from Human Papillomavirus
DGDSLPTF

SEQ ID NO: 31297 - protein, 9 aa, Artificial Sequence
  Peptide Derived from Human Papillomavirus
DGDSLPTFK

SEQ ID NO: 31298 - protein, 11 aa, Artificial Sequence
  Peptide Derived from Human Papillomavirus
DGGDWKQIVMF

SEQ ID NO: 31299 - protein, 10 aa, Artificial Sequence
  Peptide Derived from Human Papillomavirus
DGNLVSMDVK

SEQ ID NO: 31300 - protein, 11 aa, Artificial Sequence
  Peptide Derived from Human Papillomavirus
DGNLVSMDVKH

SEQ ID NO: 31301 - protein, 9 aa, Artificial Sequence
  Peptide Derived from Human Papillomavirus
DIVDDSEIA

SEQ ID NO: 31302 - protein, 10 aa, Artificial Sequence
  Peptide Derived from Human Papillomavirus
DIVDDSEIAY

SEQ ID NO: 31303 - protein, 11 aa, Artificial Sequence
  Peptide Derived from Human Papillomavirus
DIVDDSEIAYK

SEQ ID NO: 31304 - protein, 11 aa, Artificial Sequence
  Peptide Derived from Human Papillomavirus
DSDTGEDLVDF

SEQ ID NO: 31305 - protein, 8 aa, Artificial Sequence
  Peptide Derived from Human Papillomavirus
DSEIAYKY

SEQ ID NO: 31306 - protein, 9 aa, Artificial Sequence
  Peptide Derived from Human Papillomavirus
DSEIAYKYA

SEQ ID NO: 31307 - protein, 10 aa, Artificial Sequence
  Peptide Derived from Human Papillomavirus
DSIKTLLQQY

SEQ ID NO: 31308 - protein, 8 aa, Artificial Sequence
  Peptide Derived from Human Papillomavirus
DSRWPYLH

SEQ ID NO: 31309 - protein, 10 aa, Artificial Sequence
  Peptide Derived from Human Papillomavirus
DSRWPYLHNR

SEQ ID NO: 31310 - protein, 9 aa, Artificial Sequence
  Peptide Derived from Human Papillomavirus
DTGEDLVDF

SEQ ID NO: 31311 - protein, 8 aa, Artificial Sequence
  Peptide Derived from Human Papillomavirus
DTNSNASA

SEQ ID NO: 31312 - protein, 9 aa, Artificial Sequence
  Peptide Derived from Human Papillomavirus
DTNSNASAF

SEQ ID NO: 31313 - protein, 11 aa, Artificial Sequence
  Peptide Derived from Human Papillomavirus
DTNSNASAFLK

SEQ ID NO: 31314 - protein, 8 aa, Artificial Sequence
  Peptide Derived from Human Papillomavirus
DTPEWIQR

SEQ ID NO: 31315 - protein, 11 aa, Artificial Sequence
  Peptide Derived from Human Papillomavirus
DVKHRPLVQLK

SEQ ID NO: 31316 - protein, 8 aa, Artificial Sequence
  Peptide Derived from Human Papillomavirus
EAKQHRDA

SEQ ID NO: 31317 - protein, 11 aa, Artificial Sequence
  Peptide Derived from Human Papillomavirus
EAVVEKKTGDA

SEQ ID NO: 31318 - protein, 8 aa, Artificial Sequence
  Peptide Derived from Human Papillomavirus
EFMSFLTA

SEQ ID NO: 31319 - protein, 10 aa, Artificial Sequence
  Peptide Derived from Human Papillomavirus
EFMSFLTALK

SEQ ID NO: 31320 - protein, 11 aa, Artificial Sequence
  Peptide Derived from Human Papillomavirus
EFMSFLTALKR

SEQ ID NO: 31321 - protein, 9 aa, Artificial Sequence
  Peptide Derived from Human Papillomavirus
EGTGCNGWF

SEQ ID NO: 31322 - protein, 10 aa, Artificial Sequence
  Peptide Derived from Human Papillomavirus
EGTGCNGWFY

SEQ ID NO: 31323 - protein, 10 aa, Artificial Sequence
  Peptide Derived from Human Papillomavirus
EIAYKYAQLA

SEQ ID NO: 31324 - protein, 8 aa, Artificial Sequence
  Peptide Derived from Human Papillomavirus
ELNDKNWK

SEQ ID NO: 31325 - protein, 10 aa, Artificial Sequence
  Peptide Derived from Human Papillomavirus
ELNDKNWKSF

SEQ ID NO: 31326 - protein, 11 aa, Artificial Sequence
  Peptide Derived from Human Papillomavirus
ELNDKNWKSFF

SEQ ID NO: 31327 - protein, 9 aa, Artificial Sequence
  Peptide Derived from Human Papillomavirus
ELSQMVQWA

SEQ ID NO: 31328 - protein, 10 aa, Artificial Sequence
  Peptide Derived from Human Papillomavirus
ELSQMVQWAY

SEQ ID NO: 31329 - protein, 10 aa, Artificial Sequence
  Peptide Derived from Human Papillomavirus
ELVRPFKSNK

SEQ ID NO: 31330 - protein, 9 aa, Artificial Sequence
  Peptide Derived from Human Papillomavirus
ETAHALFTA

SEQ ID NO: 31331 - protein, 9 aa, Artificial Sequence
  Peptide Derived from Human Papillomavirus
ETETAHALF

SEQ ID NO: 31332 - protein, 11 aa, Artificial Sequence
  Peptide Derived from Human Papillomavirus
ETETAHALFTA

SEQ ID NO: 31333 - protein, 9 aa, Artificial Sequence
  Peptide Derived from Human Papillomavirus
ETETPCSQY

SEQ ID NO: 31334 - protein, 9 aa, Artificial Sequence
  Peptide Derived from Human Papillomavirus
ETIEKLLSK

SEQ ID NO: 31335 - protein, 11 aa, Artificial Sequence
  Peptide Derived from Human Papillomavirus
ETQQMLQVEGR

SEQ ID NO: 31336 - protein, 9 aa, Artificial Sequence
  Peptide Derived from Human Papillomavirus
FDENGNPVY

SEQ ID NO: 31337 - protein, 8 aa, Artificial Sequence
  Peptide Derived from Human Papillomavirus
FFSRTWSR

SEQ ID NO: 31338 - protein, 8 aa, Artificial Sequence
  Peptide Derived from Human Papillomavirus
FGLTPSIA

SEQ ID NO: 31339 - protein, 8 aa, Artificial Sequence
  Peptide Derived from Human Papillomavirus
FGMSLMKF

SEQ ID NO: 31340 - protein, 8 aa, Artificial Sequence
  Peptide Derived from Human Papillomavirus
FIVNDNDY

SEQ ID NO: 31341 - protein, 8 aa, Artificial Sequence
  Peptide Derived from Human Papillomavirus
FLKSNSQA

SEQ ID NO: 31342 - protein, 9 aa, Artificial Sequence
  Peptide Derived from Human Papillomavirus
FLKSNSQAK

SEQ ID NO: 31343 - protein, 8 aa, Artificial Sequence
  Peptide Derived from Human Papillomavirus
FLQGIPKK

SEQ ID NO: 31344 - protein, 9 aa, Artificial Sequence
  Peptide Derived from Human Papillomavirus
FLQGSVICF

SEQ ID NO: 31345 - protein, 9 aa, Artificial Sequence
  Peptide Derived from Human Papillomavirus
FLRYQGVEF

SEQ ID NO: 31346 - protein, 8 aa, Artificial Sequence
  Peptide Derived from Human Papillomavirus
FLTALKRF

SEQ ID NO: 31347 - protein, 9 aa, Artificial Sequence
  Peptide Derived from Human Papillomavirus
FMSFLTALK

SEQ ID NO: 31348 - protein, 10 aa, Artificial Sequence
  Peptide Derived from Human Papillomavirus
FMSFLTALKR

SEQ ID NO: 31349 - protein, 11 aa, Artificial Sequence
  Peptide Derived from Human Papillomavirus
FMSFLTALKRF

SEQ ID NO: 31350 - protein, 8 aa, Artificial Sequence
  Peptide Derived from Human Papillomavirus
FSELVRPF

SEQ ID NO: 31351 - protein, 9 aa, Artificial Sequence
  Peptide Derived from Human Papillomavirus
FSELVRPFK

SEQ ID NO: 31352 - protein, 11 aa, Artificial Sequence
  Peptide Derived from Human Papillomavirus
FSRTWSRLSLH

SEQ ID NO: 31353 - protein, 9 aa, Artificial Sequence
  Peptide Derived from Human Papillomavirus
FTAQEAKQH

SEQ ID NO: 31354 - protein, 10 aa, Artificial Sequence
  Peptide Derived from Human Papillomavirus
FTAQEAKQHR

SEQ ID NO: 31355 - protein, 9 aa, Artificial Sequence
  Peptide Derived from Human Papillomavirus
FTFPNEFPF

SEQ ID NO: 31356 - protein, 8 aa, Artificial Sequence
  Peptide Derived from Human Papillomavirus
FVNSKSHF

SEQ ID NO: 31357 - protein, 10 aa, Artificial Sequence
  Peptide Derived from Human Papillomavirus
GAANTGKSLF

SEQ ID NO: 31358 - protein, 10 aa, Artificial Sequence
  Peptide Derived from Human Papillomavirus
GCNGWFYVEA

SEQ ID NO: 31359 - protein, 10 aa, Artificial Sequence
  Peptide Derived from Human Papillomavirus
GCVDNNISPR

SEQ ID NO: 31360 - protein, 8 aa, Artificial Sequence
  Peptide Derived from Human Papillomavirus
GDSLPTFK

SEQ ID NO: 31361 - protein, 9 aa, Artificial Sequence
  Peptide Derived from Human Papillomavirus
GDTPEWIQR

SEQ ID NO: 31362 - protein, 9 aa, Artificial Sequence
  Peptide Derived from Human Papillomavirus
GDWKQIVMF

SEQ ID NO: 31363 - protein, 11 aa, Artificial Sequence
  Peptide Derived from Human Papillomavirus
GDWKQIVMFLR

SEQ ID NO: 31364 - protein, 10 aa, Artificial Sequence
  Peptide Derived from Human Papillomavirus
GGDWKQIVMF

SEQ ID NO: 31365 - protein, 8 aa, Artificial Sequence
  Peptide Derived from Human Papillomavirus
GGEGVSER

SEQ ID NO: 31366 - protein, 9 aa, Artificial Sequence
  Peptide Derived from Human Papillomavirus
GGEGVSERH

SEQ ID NO: 31367 - protein, 10 aa, Artificial Sequence
  Peptide Derived from Human Papillomavirus
GGSGGGCSQY

SEQ ID NO: 31368 - protein, 11 aa, Artificial Sequence
  Peptide Derived from Human Papillomavirus
GIPKKNCILLY

SEQ ID NO: 31369 - protein, 9 aa, Artificial Sequence
  Peptide Derived from Human Papillomavirus
GISNISEVY

SEQ ID NO: 31370 - protein, 11 aa, Artificial Sequence
  Peptide Derived from Human Papillomavirus
GLTPSIADSIK

SEQ ID NO: 31371 - protein, 9 aa, Artificial Sequence
  Peptide Derived from Human Papillomavirus
GMVVLLLVR

SEQ ID NO: 31372 - protein, 10 aa, Artificial Sequence
  Peptide Derived from Human Papillomavirus
GMVVLLLVRY

SEQ ID NO: 31373 - protein, 11 aa, Artificial Sequence
  Peptide Derived from Human Papillomavirus
GMVVLLLVRYK

SEQ ID NO: 31374 - protein, 10 aa, Artificial Sequence
  Peptide Derived from Human Papillomavirus
GSGGEGVSER

SEQ ID NO: 31375 - protein, 11 aa, Artificial Sequence
  Peptide Derived from Human Papillomavirus
GSGGEGVSERH

SEQ ID NO: 31376 - protein, 9 aa, Artificial Sequence
  Peptide Derived from Human Papillomavirus
GSGGGCSQY

SEQ ID NO: 31377 - protein, 10 aa, Artificial Sequence
  Peptide Derived from Human Papillomavirus
GSVICFVNSK

SEQ ID NO: 31378 - protein, 8 aa, Artificial Sequence
  Peptide Derived from Human Papillomavirus
GTDSRWPY

SEQ ID NO: 31379 - protein, 10 aa, Artificial Sequence
  Peptide Derived from Human Papillomavirus
GTDSRWPYLH

SEQ ID NO: 31380 - protein, 8 aa, Artificial Sequence
  Peptide Derived from Human Papillomavirus
GTGCNGWF

SEQ ID NO: 31381 - protein, 9 aa, Artificial Sequence
  Peptide Derived from Human Papillomavirus
GTGCNGWFY

SEQ ID NO: 31382 - protein, 10 aa, Artificial Sequence
  Peptide Derived from Human Papillomavirus
GVEFMSFLTA

SEQ ID NO: 31383 - protein, 9 aa, Artificial Sequence
  Peptide Derived from Human Papillomavirus
GVSFSELVR

SEQ ID NO: 31384 - protein, 11 aa, Artificial Sequence
  Peptide Derived from Human Papillomavirus
GVSFSELVRPF

SEQ ID NO: 31385 - protein, 9 aa, Artificial Sequence
  Peptide Derived from Human Papillomavirus
HALFTAQEA

SEQ ID NO: 31386 - protein, 10 aa, Artificial Sequence
  Peptide Derived from Human Papillomavirus
HALFTAQEAK

SEQ ID NO: 31387 - protein, 8 aa, Artificial Sequence
  Peptide Derived from Human Papillomavirus
HFWLQPLA

SEQ ID NO: 31388 - protein, 10 aa, Artificial Sequence
  Peptide Derived from Human Papillomavirus
HFWLQPLADA

SEQ ID NO: 31389 - protein, 11 aa, Artificial Sequence
  Peptide Derived from Human Papillomavirus
HFWLQPLADAK

SEQ ID NO: 31390 - protein, 8 aa, Artificial Sequence
  Peptide Derived from Human Papillomavirus
HSFNDCTF

SEQ ID NO: 31391 - protein, 11 aa, Artificial Sequence
  Peptide Derived from Human Papillomavirus
IAAFGLTPSIA

SEQ ID NO: 31392 - protein, 9 aa, Artificial Sequence
  Peptide Derived from Human Papillomavirus
IAYKYAQLA

SEQ ID NO: 31393 - protein, 9 aa, Artificial Sequence
  Peptide Derived from Human Papillomavirus
ICFVNSKSH

SEQ ID NO: 31394 - protein, 10 aa, Artificial Sequence
  Peptide Derived from Human Papillomavirus
ICFVNSKSHF

SEQ ID NO: 31395 - protein, 8 aa, Artificial Sequence
  Peptide Derived from Human Papillomavirus
ICIEKQSR

SEQ ID NO: 31396 - protein, 9 aa, Artificial Sequence
  Peptide Derived from Human Papillomavirus
ICIEKQSRA

SEQ ID NO: 31397 - protein, 10 aa, Artificial Sequence
  Peptide Derived from Human Papillomavirus
ICIEKQSRAA

SEQ ID NO: 31398 - protein, 11 aa, Artificial Sequence
  Peptide Derived from Human Papillomavirus
ICIEKQSRAAK

SEQ ID NO: 31399 - protein, 8 aa, Artificial Sequence
  Peptide Derived from Human Papillomavirus
IDDNLRNA

SEQ ID NO: 31400 - protein, 11 aa, Artificial Sequence
  Peptide Derived from Human Papillomavirus
ILLYGAANTGK

SEQ ID NO: 31401 - protein, 10 aa, Artificial Sequence
  Peptide Derived from Human Papillomavirus
ILNVLKTSNA

SEQ ID NO: 31402 - protein, 11 aa, Artificial Sequence
  Peptide Derived from Human Papillomavirus
ILNVLKTSNAK

SEQ ID NO: 31403 - protein, 8 aa, Artificial Sequence
  Peptide Derived from Human Papillomavirus
ISNISEVY

SEQ ID NO: 31404 - protein, 8 aa, Artificial Sequence
  Peptide Derived from Human Papillomavirus
IVDDSEIA

SEQ ID NO: 31405 - protein, 9 aa, Artificial Sequence
  Peptide Derived from Human Papillomavirus
IVDDSEIAY

SEQ ID NO: 31406 - protein, 10 aa, Artificial Sequence
  Peptide Derived from Human Papillomavirus
IVDDSEIAYK

SEQ ID NO: 31407 - protein, 11 aa, Artificial Sequence
  Peptide Derived from Human Papillomavirus
IVDDSEIAYKY

SEQ ID NO: 31408 - protein, 10 aa, Artificial Sequence
  Peptide Derived from Human Papillomavirus
IVKDCATMCR

SEQ ID NO: 31409 - protein, 11 aa, Artificial Sequence
  Peptide Derived from Human Papillomavirus
IVKDCATMCRH

SEQ ID NO: 31410 - protein, 11 aa, Artificial Sequence
  Peptide Derived from Human Papillomavirus
IVNDNDYLTQA

SEQ ID NO: 31411 - protein, 8 aa, Artificial Sequence
  Peptide Derived from Human Papillomavirus
KAAMLAKF

SEQ ID NO: 31412 - protein, 9 aa, Artificial Sequence
  Peptide Derived from Human Papillomavirus
KAAMLAKFK

SEQ ID NO: 31413 - protein, 10 aa, Artificial Sequence
  Peptide Derived from Human Papillomavirus
KAICIEKQSR

SEQ ID NO: 31414 - protein, 11 aa, Artificial Sequence
  Peptide Derived from Human Papillomavirus
KAICIEKQSRA

SEQ ID NO: 31415 - protein, 11 aa, Artificial Sequence
  Peptide Derived from Human Papillomavirus
KCGKNRETIEK

SEQ ID NO: 31416 - protein, 8 aa, Artificial Sequence
  Peptide Derived from Human Papillomavirus
KDCATMCR

SEQ ID NO: 31417 - protein, 9 aa, Artificial Sequence
  Peptide Derived from Human Papillomavirus
KDCATMCRH

SEQ ID NO: 31418 - protein, 10 aa, Artificial Sequence
  Peptide Derived from Human Papillomavirus
KDCATMCRHY

SEQ ID NO: 31419 - protein, 11 aa, Artificial Sequence
  Peptide Derived from Human Papillomavirus
KDCATMCRHYK

SEQ ID NO: 31420 - protein, 10 aa, Artificial Sequence
  Peptide Derived from Human Papillomavirus
KFKELYGVSF

SEQ ID NO: 31421 - protein, 10 aa, Artificial Sequence
  Peptide Derived from Human Papillomavirus
KFLQGSVICF

SEQ ID NO: 31422 - protein, 8 aa, Artificial Sequence
  Peptide Derived from Human Papillomavirus
KIGMLDDA

SEQ ID NO: 31423 - protein, 11 aa, Artificial Sequence
  Peptide Derived from Human Papillomavirus
KIVKDCATMCR

SEQ ID NO: 31424 - protein, 8 aa, Artificial Sequence
  Peptide Derived from Human Papillomavirus
KLRSTAAA

SEQ ID NO: 31425 - protein, 10 aa, Artificial Sequence
  Peptide Derived from Human Papillomavirus
KLRSTAAALY

SEQ ID NO: 31426 - protein, 10 aa, Artificial Sequence
  Peptide Derived from Human Papillomavirus
KSFFSRTWSR

SEQ ID NO: 31427 - protein, 10 aa, Artificial Sequence
  Peptide Derived from Human Papillomavirus
KSHFWLQPLA

SEQ ID NO: 31428 - protein, 10 aa, Artificial Sequence
  Peptide Derived from Human Papillomavirus
KSLFGMSLMK

SEQ ID NO: 31429 - protein, 11 aa, Artificial Sequence
  Peptide Derived from Human Papillomavirus
KSLFGMSLMKF

SEQ ID NO: 31430 - protein, 10 aa, Artificial Sequence
  Peptide Derived from Human Papillomavirus
KSNSQAKIVK

SEQ ID NO: 31431 - protein, 10 aa, Artificial Sequence
  Peptide Derived from Human Papillomavirus
KSTCCDWCIA

SEQ ID NO: 31432 - protein, 11 aa, Artificial Sequence
  Peptide Derived from Human Papillomavirus
KSTCCDWCIAA

SEQ ID NO: 31433 - protein, 11 aa, Artificial Sequence
  Peptide Derived from Human Papillomavirus
KTGISNISEVY

SEQ ID NO: 31434 - protein, 10 aa, Artificial Sequence
  Peptide Derived from Human Papillomavirus
KTLLQQYCLY

SEQ ID NO: 31435 - protein, 8 aa, Artificial Sequence
  Peptide Derived from Human Papillomavirus
KTSNAKAA

SEQ ID NO: 31436 - protein, 11 aa, Artificial Sequence
  Peptide Derived from Human Papillomavirus
KTSNAKAAMLA

SEQ ID NO: 31437 - protein, 8 aa, Artificial Sequence
  Peptide Derived from Human Papillomavirus
LADTNSNA

SEQ ID NO: 31438 - protein, 10 aa, Artificial Sequence
  Peptide Derived from Human Papillomavirus
LADTNSNASA

SEQ ID NO: 31439 - protein, 11 aa, Artificial Sequence
  Peptide Derived from Human Papillomavirus
LADTNSNASAF

SEQ ID NO: 31440 - protein, 8 aa, Artificial Sequence
  Peptide Derived from Human Papillomavirus
LAKFKELY

SEQ ID NO: 31441 - protein, 11 aa, Artificial Sequence
  Peptide Derived from Human Papillomavirus
LDDATVPCWNY

SEQ ID NO: 31442 - protein, 11 aa, Artificial Sequence
  Peptide Derived from Human Papillomavirus
LDGNLVSMDVK

SEQ ID NO: 31443 - protein, 9 aa, Artificial Sequence
  Peptide Derived from Human Papillomavirus
LFESEDSGY

SEQ ID NO: 31444 - protein, 8 aa, Artificial Sequence
  Peptide Derived from Human Papillomavirus
LFGMSLMK

SEQ ID NO: 31445 - protein, 9 aa, Artificial Sequence
  Peptide Derived from Human Papillomavirus
LFGMSLMKF

SEQ ID NO: 31446 - protein, 8 aa, Artificial Sequence
  Peptide Derived from Human Papillomavirus
LFTAQEAK

SEQ ID NO: 31447 - protein, 10 aa, Artificial Sequence
  Peptide Derived from Human Papillomavirus
LFTAQEAKQH

SEQ ID NO: 31448 - protein, 11 aa, Artificial Sequence
  Peptide Derived from Human Papillomavirus
LFTAQEAKQHR

SEQ ID NO: 31449 - protein, 8 aa, Artificial Sequence
  Peptide Derived from Human Papillomavirus
LITSNINA

SEQ ID NO: 31450 - protein, 9 aa, Artificial Sequence
  Peptide Derived from Human Papillomavirus
LLITSNINA

SEQ ID NO: 31451 - protein, 10 aa, Artificial Sequence
  Peptide Derived from Human Papillomavirus
LLLVRYKCGK

SEQ ID NO: 31452 - protein, 8 aa, Artificial Sequence
  Peptide Derived from Human Papillomavirus
LLQQYCLY

SEQ ID NO: 31453 - protein, 10 aa, Artificial Sequence
  Peptide Derived from Human Papillomavirus
LLQQYCLYLH

SEQ ID NO: 31454 - protein, 9 aa, Artificial Sequence
  Peptide Derived from Human Papillomavirus
LLVRYKCGK

SEQ ID NO: 31455 - protein, 11 aa, Artificial Sequence
  Peptide Derived from Human Papillomavirus
LLVRYKCGKNR

SEQ ID NO: 31456 - protein, 10 aa, Artificial Sequence
  Peptide Derived from Human Papillomavirus
LLYGAANTGK

SEQ ID NO: 31457 - protein, 9 aa, Artificial Sequence
  Peptide Derived from Human Papillomavirus
LSLHEDEDK

SEQ ID NO: 31458 - protein, 8 aa, Artificial Sequence
  Peptide Derived from Human Papillomavirus
LSQMVQWA

SEQ ID NO: 31459 - protein, 9 aa, Artificial Sequence
  Peptide Derived from Human Papillomavirus
LSQMVQWAY

SEQ ID NO: 31460 - protein, 9 aa, Artificial Sequence
  Peptide Derived from Human Papillomavirus
LTNILNVLK

SEQ ID NO: 31461 - protein, 10 aa, Artificial Sequence
  Peptide Derived from Human Papillomavirus
LTPSIADSIK

SEQ ID NO: 31462 - protein, 9 aa, Artificial Sequence
  Peptide Derived from Human Papillomavirus
LTQAETETA

SEQ ID NO: 31463 - protein, 10 aa, Artificial Sequence
  Peptide Derived from Human Papillomavirus
LTQAETETAH

SEQ ID NO: 31464 - protein, 11 aa, Artificial Sequence
  Peptide Derived from Human Papillomavirus
LTQAETETAHA

SEQ ID NO: 31465 - protein, 11 aa, Artificial Sequence
  Peptide Derived from Human Papillomavirus
LVDFIVNDNDY

SEQ ID NO: 31466 - protein, 9 aa, Artificial Sequence
  Peptide Derived from Human Papillomavirus
LVRPFKSNK

SEQ ID NO: 31467 - protein, 8 aa, Artificial Sequence
  Peptide Derived from Human Papillomavirus
LVRYKCGK

SEQ ID NO: 31468 - protein, 10 aa, Artificial Sequence
  Peptide Derived from Human Papillomavirus
LVRYKCGKNR

SEQ ID NO: 31469 - protein, 8 aa, Artificial Sequence
  Peptide Derived from Human Papillomavirus
LVSMDVKH

SEQ ID NO: 31470 - protein, 9 aa, Artificial Sequence
  Peptide Derived from Human Papillomavirus
LVSMDVKHR

SEQ ID NO: 31471 - protein, 10 aa, Artificial Sequence
  Peptide Derived from Human Papillomavirus
LVVFTFPNEF

SEQ ID NO: 31472 - protein, 9 aa, Artificial Sequence
  Peptide Derived from Human Papillomavirus
MCMMIEPPK

SEQ ID NO: 31473 - protein, 11 aa, Artificial Sequence
  Peptide Derived from Human Papillomavirus
MCMMIEPPKLR

SEQ ID NO: 31474 - protein, 8 aa, Artificial Sequence
  Peptide Derived from Human Papillomavirus
MCRHYKRA

SEQ ID NO: 31475 - protein, 10 aa, Artificial Sequence
  Peptide Derived from Human Papillomavirus
MCRHYKRAEK

SEQ ID NO: 31476 - protein, 11 aa, Artificial Sequence
  Peptide Derived from Human Papillomavirus
MCRHYKRAEKK

SEQ ID NO: 31477 - protein, 10 aa, Artificial Sequence
  Peptide Derived from Human Papillomavirus
MFLRYQGVEF

SEQ ID NO: 31478 - protein, 8 aa, Artificial Sequence
  Peptide Derived from Human Papillomavirus
MIEPPKLR

SEQ ID NO: 31479 - protein, 11 aa, Artificial Sequence
  Peptide Derived from Human Papillomavirus
MIEPPKLRSTA

SEQ ID NO: 31480 - protein, 9 aa, Artificial Sequence
  Peptide Derived from Human Papillomavirus
MLAKFKELY

SEQ ID NO: 31481 - protein, 8 aa, Artificial Sequence
  Peptide Derived from Human Papillomavirus
MLQVEGRH

SEQ ID NO: 31482 - protein, 9 aa, Artificial Sequence
  Peptide Derived from Human Papillomavirus
MMIEPPKLR

SEQ ID NO: 31483 - protein, 8 aa, Artificial Sequence
  Peptide Derived from Human Papillomavirus
MSFLTALK

SEQ ID NO: 31484 - protein, 9 aa, Artificial Sequence
  Peptide Derived from Human Papillomavirus
MSFLTALKR

SEQ ID NO: 31485 - protein, 10 aa, Artificial Sequence
  Peptide Derived from Human Papillomavirus
MSFLTALKRF

SEQ ID NO: 31486 - protein, 8 aa, Artificial Sequence
  Peptide Derived from Human Papillomavirus
MSMSQWIK

SEQ ID NO: 31487 - protein, 9 aa, Artificial Sequence
  Peptide Derived from Human Papillomavirus
MSMSQWIKY

SEQ ID NO: 31488 - protein, 10 aa, Artificial Sequence
  Peptide Derived from Human Papillomavirus
MSMSQWIKYR

SEQ ID NO: 31489 - protein, 8 aa, Artificial Sequence
  Peptide Derived from Human Papillomavirus
MSQWIKYR

SEQ ID NO: 31490 - protein, 11 aa, Artificial Sequence
  Peptide Derived from Human Papillomavirus
MSQWIKYRCDR

SEQ ID NO: 31491 - protein, 8 aa, Artificial Sequence
  Peptide Derived from Human Papillomavirus
MVVLLLVR

SEQ ID NO: 31492 - protein, 9 aa, Artificial Sequence
  Peptide Derived from Human Papillomavirus
MVVLLLVRY

SEQ ID NO: 31493 - protein, 10 aa, Artificial Sequence
  Peptide Derived from Human Papillomavirus
MVVLLLVRYK

SEQ ID NO: 31494 - protein, 10 aa, Artificial Sequence
  Peptide Derived from Human Papillomavirus
NAGTDSRWPY

SEQ ID NO: 31495 - protein, 8 aa, Artificial Sequence
  Peptide Derived from Human Papillomavirus
NAKAAMLA

SEQ ID NO: 31496 - protein, 9 aa, Artificial Sequence
  Peptide Derived from Human Papillomavirus
NAKAAMLAK

SEQ ID NO: 31497 - protein, 10 aa, Artificial Sequence
  Peptide Derived from Human Papillomavirus
NAKAAMLAKF

SEQ ID NO: 31498 - protein, 11 aa, Artificial Sequence
  Peptide Derived from Human Papillomavirus
NAKAAMLAKFK

SEQ ID NO: 31499 - protein, 8 aa, Artificial Sequence
  Peptide Derived from Human Papillomavirus
NCILLYGA

SEQ ID NO: 31500 - protein, 9 aa, Artificial Sequence
  Peptide Derived from Human Papillomavirus
NCILLYGAA

SEQ ID NO: 31501 - protein, 9 aa, Artificial Sequence
  Peptide Derived from Human Papillomavirus
NDGDSLPTF

SEQ ID NO: 31502 - protein, 10 aa, Artificial Sequence
  Peptide Derived from Human Papillomavirus
NDGDSLPTFK

SEQ ID NO: 31503 - protein, 10 aa, Artificial Sequence
  Peptide Derived from Human Papillomavirus
NDIVDDSEIA

SEQ ID NO: 31504 - protein, 11 aa, Artificial Sequence
  Peptide Derived from Human Papillomavirus
NDIVDDSEIAY

SEQ ID NO: 31505 - protein, 8 aa, Artificial Sequence
  Peptide Derived from Human Papillomavirus
NDKNWKSF

SEQ ID NO: 31506 - protein, 9 aa, Artificial Sequence
  Peptide Derived from Human Papillomavirus
NDKNWKSFF

SEQ ID NO: 31507 - protein, 11 aa, Artificial Sequence
  Peptide Derived from Human Papillomavirus
NDKNWKSFFSR

SEQ ID NO: 31508 - protein, 9 aa, Artificial Sequence
  Peptide Derived from Human Papillomavirus
NDNDYLTQA

SEQ ID NO: 31509 - protein, 11 aa, Artificial Sequence
  Peptide Derived from Human Papillomavirus
NGNPVYELNDK

SEQ ID NO: 31510 - protein, 8 aa, Artificial Sequence
  Peptide Derived from Human Papillomavirus
NGWFYVEA

SEQ ID NO: 31511 - protein, 11 aa, Artificial Sequence
  Peptide Derived from Human Papillomavirus
NILNVLKTSNA

SEQ ID NO: 31512 - protein, 9 aa, Artificial Sequence
  Peptide Derived from Human Papillomavirus
NINAGTDSR

SEQ ID NO: 31513 - protein, 8 aa, Artificial Sequence
  Peptide Derived from Human Papillomavirus
NISPRLKA

SEQ ID NO: 31514 - protein, 8 aa, Artificial Sequence
  Peptide Derived from Human Papillomavirus
NLVSMDVK

SEQ ID NO: 31515 - protein, 9 aa, Artificial Sequence
  Peptide Derived from Human Papillomavirus
NLVSMDVKH

SEQ ID NO: 31516 - protein, 10 aa, Artificial Sequence
  Peptide Derived from Human Papillomavirus
NLVSMDVKHR

SEQ ID NO: 31517 - protein, 9 aa, Artificial Sequence
  Peptide Derived from Human Papillomavirus
NSNASAFLK

SEQ ID NO: 31518 - protein, 8 aa, Artificial Sequence
  Peptide Derived from Human Papillomavirus
NSQAKIVK

SEQ ID NO: 31519 - protein, 11 aa, Artificial Sequence
  Peptide Derived from Human Papillomavirus
NSQAKIVKDCA

SEQ ID NO: 31520 - protein, 8 aa, Artificial Sequence
  Peptide Derived from Human Papillomavirus
NVLKTSNA

SEQ ID NO: 31521 - protein, 9 aa, Artificial Sequence
  Peptide Derived from Human Papillomavirus
NVLKTSNAK

SEQ ID NO: 31522 - protein, 10 aa, Artificial Sequence
  Peptide Derived from Human Papillomavirus
NVLKTSNAKA

SEQ ID NO: 31523 - protein, 11 aa, Artificial Sequence
  Peptide Derived from Human Papillomavirus
NVLKTSNAKAA

SEQ ID NO: 31524 - protein, 11 aa, Artificial Sequence
  Peptide Derived from Human Papillomavirus
PCWNYIDDNLR

SEQ ID NO: 31525 - protein, 10 aa, Artificial Sequence
  Peptide Derived from Human Papillomavirus
PFDENGNPVY

SEQ ID NO: 31526 - protein, 10 aa, Artificial Sequence
  Peptide Derived from Human Papillomavirus
PLLITSNINA

SEQ ID NO: 31527 - protein, 10 aa, Artificial Sequence
  Peptide Derived from Human Papillomavirus
PLTNILNVLK

SEQ ID NO: 31528 - protein, 10 aa, Artificial Sequence
  Peptide Derived from Human Papillomavirus
PMCMMIEPPK

SEQ ID NO: 31529 - protein, 8 aa, Artificial Sequence
  Peptide Derived from Human Papillomavirus
PSIADSIK

SEQ ID NO: 31530 - protein, 8 aa, Artificial Sequence
  Peptide Derived from Human Papillomavirus
PVYELNDK

SEQ ID NO: 31531 - protein, 11 aa, Artificial Sequence
  Peptide Derived from Human Papillomavirus
PVYELNDKNWK

SEQ ID NO: 31532 - protein, 8 aa, Artificial Sequence
  Peptide Derived from Human Papillomavirus
QAETETAH

SEQ ID NO: 31533 - protein, 9 aa, Artificial Sequence
  Peptide Derived from Human Papillomavirus
QAETETAHA

SEQ ID NO: 31534 - protein, 11 aa, Artificial Sequence
  Peptide Derived from Human Papillomavirus
QAETETAHALF

SEQ ID NO: 31535 - protein, 9 aa, Artificial Sequence
  Peptide Derived from Human Papillomavirus
QAKIVKDCA

SEQ ID NO: 31536 - protein, 11 aa, Artificial Sequence
  Peptide Derived from Human Papillomavirus
QGSVICFVNSK

SEQ ID NO: 31537 - protein, 8 aa, Artificial Sequence
  Peptide Derived from Human Papillomavirus
QGVEFMSF

SEQ ID NO: 31538 - protein, 11 aa, Artificial Sequence
  Peptide Derived from Human Papillomavirus
QGVEFMSFLTA

SEQ ID NO: 31539 - protein, 8 aa, Artificial Sequence
  Peptide Derived from Human Papillomavirus
QIVMFLRY

SEQ ID NO: 31540 - protein, 9 aa, Artificial Sequence
  Peptide Derived from Human Papillomavirus
QLADTNSNA

SEQ ID NO: 31541 - protein, 11 aa, Artificial Sequence
  Peptide Derived from Human Papillomavirus
QLADTNSNASA

SEQ ID NO: 31542 - protein, 8 aa, Artificial Sequence
  Peptide Derived from Human Papillomavirus
QMLQVEGR

SEQ ID NO: 31543 - protein, 9 aa, Artificial Sequence
  Peptide Derived from Human Papillomavirus
QMLQVEGRH

SEQ ID NO: 31544 - protein, 9 aa, Artificial Sequence
  Peptide Derived from Human Papillomavirus
QMSMSQWIK

SEQ ID NO: 31545 - protein, 10 aa, Artificial Sequence
  Peptide Derived from Human Papillomavirus
QMSMSQWIKY

SEQ ID NO: 31546 - protein, 11 aa, Artificial Sequence
  Peptide Derived from Human Papillomavirus
QMSMSQWIKYR

SEQ ID NO: 31547 - protein, 8 aa, Artificial Sequence
  Peptide Derived from Human Papillomavirus
QSRAAKRR

SEQ ID NO: 31548 - protein, 10 aa, Artificial Sequence
  Peptide Derived from Human Papillomavirus
QSRAAKRRLF

SEQ ID NO: 31549 - protein, 8 aa, Artificial Sequence
  Peptide Derived from Human Papillomavirus
QTVLQHSF

SEQ ID NO: 31550 - protein, 8 aa, Artificial Sequence
  Peptide Derived from Human Papillomavirus
RAAKRRLF

SEQ ID NO: 31551 - protein, 8 aa, Artificial Sequence
  Peptide Derived from Human Papillomavirus
RDAVQVLK

SEQ ID NO: 31552 - protein, 9 aa, Artificial Sequence
  Peptide Derived from Human Papillomavirus
RDAVQVLKR

SEQ ID NO: 31553 - protein, 10 aa, Artificial Sequence
  Peptide Derived from Human Papillomavirus
RDAVQVLKRK

SEQ ID NO: 31554 - protein, 11 aa, Artificial Sequence
  Peptide Derived from Human Papillomavirus
RDAVQVLKRKY

SEQ ID NO: 31555 - protein, 8 aa, Artificial Sequence
  Peptide Derived from Human Papillomavirus
RFLQGIPK

SEQ ID NO: 31556 - protein, 9 aa, Artificial Sequence
  Peptide Derived from Human Papillomavirus
RFLQGIPKK

SEQ ID NO: 31557 - protein, 10 aa, Artificial Sequence
  Peptide Derived from Human Papillomavirus
RLFESEDSGY

SEQ ID NO: 31558 - protein, 9 aa, Artificial Sequence
  Peptide Derived from Human Papillomavirus
RLKAICIEK

SEQ ID NO: 31559 - protein, 10 aa, Artificial Sequence
  Peptide Derived from Human Papillomavirus
RLSLHEDEDK

SEQ ID NO: 31560 - protein, 11 aa, Artificial Sequence
  Peptide Derived from Human Papillomavirus
RLVVFTFPNEF

SEQ ID NO: 31561 - protein, 8 aa, Artificial Sequence
  Peptide Derived from Human Papillomavirus
RSTAAALY

SEQ ID NO: 31562 - protein, 10 aa, Artificial Sequence
  Peptide Derived from Human Papillomavirus
RSTAAALYWY

SEQ ID NO: 31563 - protein, 11 aa, Artificial Sequence
  Peptide Derived from Human Papillomavirus
RSTAAALYWYK

SEQ ID NO: 31564 - protein, 9 aa, Artificial Sequence
  Peptide Derived from Human Papillomavirus
RTWSRLSLH

SEQ ID NO: 31565 - protein, 9 aa, Artificial Sequence
  Peptide Derived from Human Papillomavirus
RVDDGGDWK

SEQ ID NO: 31566 - protein, 10 aa, Artificial Sequence
  Peptide Derived from Human Papillomavirus
SAFLKSNSQA

SEQ ID NO: 31567 - protein, 11 aa, Artificial Sequence
  Peptide Derived from Human Papillomavirus
SAFLKSNSQAK

SEQ ID NO: 31568 - protein, 10 aa, Artificial Sequence
  Peptide Derived from Human Papillomavirus
SDTGEDLVDF

SEQ ID NO: 31569 - protein, 9 aa, Artificial Sequence
  Peptide Derived from Human Papillomavirus
SFFSRTWSR

SEQ ID NO: 31570 - protein, 8 aa, Artificial Sequence
  Peptide Derived from Human Papillomavirus
SFLTALKR

SEQ ID NO: 31571 - protein, 9 aa, Artificial Sequence
  Peptide Derived from Human Papillomavirus
SFLTALKRF

SEQ ID NO: 31572 - protein, 9 aa, Artificial Sequence
  Peptide Derived from Human Papillomavirus
SFSELVRPF

SEQ ID NO: 31573 - protein, 10 aa, Artificial Sequence
  Peptide Derived from Human Papillomavirus
SFSELVRPFK

SEQ ID NO: 31574 - protein, 11 aa, Artificial Sequence
  Peptide Derived from Human Papillomavirus
SGCVDNNISPR

SEQ ID NO: 31575 - protein, 9 aa, Artificial Sequence
  Peptide Derived from Human Papillomavirus
SGGEGVSER

SEQ ID NO: 31576 - protein, 10 aa, Artificial Sequence
  Peptide Derived from Human Papillomavirus
SGGEGVSERH

SEQ ID NO: 31577 - protein, 8 aa, Artificial Sequence
  Peptide Derived from Human Papillomavirus
SGGGCSQY

SEQ ID NO: 31578 - protein, 11 aa, Artificial Sequence
  Peptide Derived from Human Papillomavirus
SGGSGGGCSQY

SEQ ID NO: 31579 - protein, 11 aa, Artificial Sequence
  Peptide Derived from Human Papillomavirus
SGSGGEGVSER

SEQ ID NO: 31580 - protein, 9 aa, Artificial Sequence
  Peptide Derived from Human Papillomavirus
SIKTLLQQY

SEQ ID NO: 31581 - protein, 9 aa, Artificial Sequence
  Peptide Derived from Human Papillomavirus
SLFGMSLMK

SEQ ID NO: 31582 - protein, 10 aa, Artificial Sequence
  Peptide Derived from Human Papillomavirus
SLFGMSLMKF

SEQ ID NO: 31583 - protein, 8 aa, Artificial Sequence
  Peptide Derived from Human Papillomavirus
SLHEDEDK

SEQ ID NO: 31584 - protein, 8 aa, Artificial Sequence
  Peptide Derived from Human Papillomavirus
SMSQWIKY

SEQ ID NO: 31585 - protein, 9 aa, Artificial Sequence
  Peptide Derived from Human Papillomavirus
SMSQWIKYR

SEQ ID NO: 31586 - protein, 9 aa, Artificial Sequence
  Peptide Derived from Human Papillomavirus
STAAALYWY

SEQ ID NO: 31587 - protein, 10 aa, Artificial Sequence
  Peptide Derived from Human Papillomavirus
STAAALYWYK

SEQ ID NO: 31588 - protein, 9 aa, Artificial Sequence
  Peptide Derived from Human Papillomavirus
STCCDWCIA

SEQ ID NO: 31589 - protein, 10 aa, Artificial Sequence
  Peptide Derived from Human Papillomavirus
STCCDWCIAA

SEQ ID NO: 31590 - protein, 11 aa, Artificial Sequence
  Peptide Derived from Human Papillomavirus
STCCDWCIAAF

SEQ ID NO: 31591 - protein, 9 aa, Artificial Sequence
  Peptide Derived from Human Papillomavirus
SVICFVNSK

SEQ ID NO: 31592 - protein, 11 aa, Artificial Sequence
  Peptide Derived from Human Papillomavirus
SVICFVNSKSH

SEQ ID NO: 31593 - protein, 8 aa, Artificial Sequence
  Peptide Derived from Human Papillomavirus
TAAALYWY

SEQ ID NO: 31594 - protein, 9 aa, Artificial Sequence
  Peptide Derived from Human Papillomavirus
TAAALYWYK

SEQ ID NO: 31595 - protein, 8 aa, Artificial Sequence
  Peptide Derived from Human Papillomavirus
TAHALFTA

SEQ ID NO: 31596 - protein, 11 aa, Artificial Sequence
  Peptide Derived from Human Papillomavirus
TAHALFTAQEA

SEQ ID NO: 31597 - protein, 8 aa, Artificial Sequence
  Peptide Derived from Human Papillomavirus
TAQEAKQH

SEQ ID NO: 31598 - protein, 9 aa, Artificial Sequence
  Peptide Derived from Human Papillomavirus
TAQEAKQHR

SEQ ID NO: 31599 - protein, 11 aa, Artificial Sequence
  Peptide Derived from Human Papillomavirus
TAQEAKQHRDA

SEQ ID NO: 31600 - protein, 8 aa, Artificial Sequence
  Peptide Derived from Human Papillomavirus
TCCDWCIA

SEQ ID NO: 31601 - protein, 9 aa, Artificial Sequence
  Peptide Derived from Human Papillomavirus
TCCDWCIAA

SEQ ID NO: 31602 - protein, 10 aa, Artificial Sequence
  Peptide Derived from Human Papillomavirus
TCCDWCIAAF

SEQ ID NO: 31603 - protein, 9 aa, Artificial Sequence
  Peptide Derived from Human Papillomavirus
TDSRWPYLH

SEQ ID NO: 31604 - protein, 11 aa, Artificial Sequence
  Peptide Derived from Human Papillomavirus
TDSRWPYLHNR

SEQ ID NO: 31605 - protein, 11 aa, Artificial Sequence
  Peptide Derived from Human Papillomavirus
TFELSQMVQWA

SEQ ID NO: 31606 - protein, 8 aa, Artificial Sequence
  Peptide Derived from Human Papillomavirus
TFPNEFPF

SEQ ID NO: 31607 - protein, 8 aa, Artificial Sequence
  Peptide Derived from Human Papillomavirus
TGCNGWFY

SEQ ID NO: 31608 - protein, 11 aa, Artificial Sequence
  Peptide Derived from Human Papillomavirus
TGCNGWFYVEA

SEQ ID NO: 31609 - protein, 8 aa, Artificial Sequence
  Peptide Derived from Human Papillomavirus
TGEDLVDF

SEQ ID NO: 31610 - protein, 10 aa, Artificial Sequence
  Peptide Derived from Human Papillomavirus
TGISNISEVY

SEQ ID NO: 31611 - protein, 8 aa, Artificial Sequence
  Peptide Derived from Human Papillomavirus
TIEKLLSK

SEQ ID NO: 31612 - protein, 9 aa, Artificial Sequence
  Peptide Derived from Human Papillomavirus
TLLQQYCLY

SEQ ID NO: 31613 - protein, 11 aa, Artificial Sequence
  Peptide Derived from Human Papillomavirus
TLLQQYCLYLH

SEQ ID NO: 31614 - protein, 8 aa, Artificial Sequence
  Peptide Derived from Human Papillomavirus
TMCRHYKR

SEQ ID NO: 31615 - protein, 9 aa, Artificial Sequence
  Peptide Derived from Human Papillomavirus
TMCRHYKRA

SEQ ID NO: 31616 - protein, 11 aa, Artificial Sequence
  Peptide Derived from Human Papillomavirus
TMCRHYKRAEK

SEQ ID NO: 31617 - protein, 10 aa, Artificial Sequence
  Peptide Derived from Human Papillomavirus
TSNAKAAMLA

SEQ ID NO: 31618 - protein, 11 aa, Artificial Sequence
  Peptide Derived from Human Papillomavirus
TSNAKAAMLAK

SEQ ID NO: 31619 - protein, 11 aa, Artificial Sequence
  Peptide Derived from Human Papillomavirus
TSNINAGTDSR

SEQ ID NO: 31620 - protein, 8 aa, Artificial Sequence
  Peptide Derived from Human Papillomavirus
VDDGGDWK

SEQ ID NO: 31621 - protein, 8 aa, Artificial Sequence
  Peptide Derived from Human Papillomavirus
VDDSEIAY

SEQ ID NO: 31622 - protein, 9 aa, Artificial Sequence
  Peptide Derived from Human Papillomavirus
VDDSEIAYK

SEQ ID NO: 31623 - protein, 10 aa, Artificial Sequence
  Peptide Derived from Human Papillomavirus
VDDSEIAYKY

SEQ ID NO: 31624 - protein, 11 aa, Artificial Sequence
  Peptide Derived from Human Papillomavirus
VDDSEIAYKYA

SEQ ID NO: 31625 - protein, 10 aa, Artificial Sequence
  Peptide Derived from Human Papillomavirus
VDFIVNDNDY

SEQ ID NO: 31626 - protein, 8 aa, Artificial Sequence
  Peptide Derived from Human Papillomavirus
VDNNISPR

SEQ ID NO: 31627 - protein, 10 aa, Artificial Sequence
  Peptide Derived from Human Papillomavirus
VDNNISPRLK

SEQ ID NO: 31628 - protein, 11 aa, Artificial Sequence
  Peptide Derived from Human Papillomavirus
VDNNISPRLKA

SEQ ID NO: 31629 - protein, 8 aa, Artificial Sequence
  Peptide Derived from Human Papillomavirus
VFTFPNEF

SEQ ID NO: 31630 - protein, 10 aa, Artificial Sequence
  Peptide Derived from Human Papillomavirus
VFTFPNEFPF

SEQ ID NO: 31631 - protein, 8 aa, Artificial Sequence
  Peptide Derived from Human Papillomavirus
VICFVNSK

SEQ ID NO: 31632 - protein, 10 aa, Artificial Sequence
  Peptide Derived from Human Papillomavirus
VICFVNSKSH

SEQ ID NO: 31633 - protein, 11 aa, Artificial Sequence
  Peptide Derived from Human Papillomavirus
VICFVNSKSHF

SEQ ID NO: 31634 - protein, 8 aa, Artificial Sequence
  Peptide Derived from Human Papillomavirus
VLKTSNAK

SEQ ID NO: 31635 - protein, 9 aa, Artificial Sequence
  Peptide Derived from Human Papillomavirus
VLKTSNAKA

SEQ ID NO: 31636 - protein, 10 aa, Artificial Sequence
  Peptide Derived from Human Papillomavirus
VLKTSNAKAA

SEQ ID NO: 31637 - protein, 8 aa, Artificial Sequence
  Peptide Derived from Human Papillomavirus
VLLLVRYK

SEQ ID NO: 31638 - protein, 11 aa, Artificial Sequence
  Peptide Derived from Human Papillomavirus
VLLLVRYKCGK

SEQ ID NO: 31639 - protein, 11 aa, Artificial Sequence
  Peptide Derived from Human Papillomavirus
VLQHSFNDCTF

SEQ ID NO: 31640 - protein, 11 aa, Artificial Sequence
  Peptide Derived from Human Papillomavirus
VMFLRYQGVEF

SEQ ID NO: 31641 - protein, 8 aa, Artificial Sequence
  Peptide Derived from Human Papillomavirus
VSFSELVR

SEQ ID NO: 31642 - protein, 10 aa, Artificial Sequence
  Peptide Derived from Human Papillomavirus
VSFSELVRPF

SEQ ID NO: 31643 - protein, 11 aa, Artificial Sequence
  Peptide Derived from Human Papillomavirus
VSFSELVRPFK

SEQ ID NO: 31644 - protein, 8 aa, Artificial Sequence
  Peptide Derived from Human Papillomavirus
VSMDVKHR

SEQ ID NO: 31645 - protein, 9 aa, Artificial Sequence
  Peptide Derived from Human Papillomavirus
VVEKKTGDA

SEQ ID NO: 31646 - protein, 9 aa, Artificial Sequence
  Peptide Derived from Human Papillomavirus
VVFTFPNEF

SEQ ID NO: 31647 - protein, 11 aa, Artificial Sequence
  Peptide Derived from Human Papillomavirus
VVFTFPNEFPF

SEQ ID NO: 31648 - protein, 8 aa, Artificial Sequence
  Peptide Derived from Human Papillomavirus
VVLLLVRY

SEQ ID NO: 31649 - protein, 9 aa, Artificial Sequence
  Peptide Derived from Human Papillomavirus
VVLLLVRYK

SEQ ID NO: 31650 - protein, 10 aa, Artificial Sequence
  Peptide Derived from Human Papillomavirus
WFYVEAVVEK

SEQ ID NO: 31651 - protein, 11 aa, Artificial Sequence
  Peptide Derived from Human Papillomavirus
WFYVEAVVEKK

SEQ ID NO: 31652 - protein, 10 aa, Artificial Sequence
  Peptide Derived from Human Papillomavirus
WGMVVLLLVR

SEQ ID NO: 31653 - protein, 11 aa, Artificial Sequence
  Peptide Derived from Human Papillomavirus
WGMVVLLLVRY

SEQ ID NO: 31654 - protein, 8 aa, Artificial Sequence
  Peptide Derived from Human Papillomavirus
WIKYRCDR

SEQ ID NO: 31655 - protein, 10 aa, Artificial Sequence
  Peptide Derived from Human Papillomavirus
WIQRQTVLQH

SEQ ID NO: 31656 - protein, 8 aa, Artificial Sequence
  Peptide Derived from Human Papillomavirus
WLQPLADA

SEQ ID NO: 31657 - protein, 9 aa, Artificial Sequence
  Peptide Derived from Human Papillomavirus
WLQPLADAK

SEQ ID NO: 31658 - protein, 11 aa, Artificial Sequence
  Peptide Derived from Human Papillomavirus
YAQLADTNSNA

SEQ ID NO: 31659 - protein, 11 aa, Artificial Sequence
  Peptide Derived from Human Papillomavirus
YCLYLHIQSLA

SEQ ID NO: 31660 - protein, 8 aa, Artificial Sequence
  Peptide Derived from Human Papillomavirus
YGAANTGK

SEQ ID NO: 31661 - protein, 11 aa, Artificial Sequence
  Peptide Derived from Human Papillomavirus
YGAANTGKSLF

SEQ ID NO: 31662 - protein, 10 aa, Artificial Sequence
  Peptide Derived from Human Papillomavirus
YGDTPEWIQR

SEQ ID NO: 31663 - protein, 10 aa, Artificial Sequence
  Peptide Derived from Human Papillomavirus
YGVSFSELVR

SEQ ID NO: 31664 - protein, 9 aa, Artificial Sequence
  Peptide Derived from Human Papillomavirus
YIDDNLRNA

SEQ ID NO: 31665 - protein, 8 aa, Artificial Sequence
  Peptide Derived from Human Papillomavirus
YLHIQSLA

SEQ ID NO: 31666 - protein, 9 aa, Artificial Sequence
  Peptide Derived from Human Papillomavirus
YLHNRLVVF

SEQ ID NO: 31667 - protein, 11 aa, Artificial Sequence
  Peptide Derived from Human Papillomavirus
YLHNRLVVFTF

SEQ ID NO: 31668 - protein, 10 aa, Artificial Sequence
  Peptide Derived from Human Papillomavirus
YLTQAETETA

SEQ ID NO: 31669 - protein, 11 aa, Artificial Sequence
  Peptide Derived from Human Papillomavirus
YLTQAETETAH

SEQ ID NO: 31670 - protein, 8 aa, Artificial Sequence
  Peptide Derived from Human Papillomavirus
YVEAVVEK

SEQ ID NO: 31671 - protein, 9 aa, Artificial Sequence
  Peptide Derived from Human Papillomavirus
YVEAVVEKK

SEQ ID NO: 31672 - protein, 9 aa, Artificial Sequence
  Peptide Derived from Human Papillomavirus
AATHTKAVA

SEQ ID NO: 31673 - protein, 9 aa, Artificial Sequence
  Peptide Derived from Human Papillomavirus
AFNSSHKGR

SEQ ID NO: 31674 - protein, 11 aa, Artificial Sequence
  Peptide Derived from Human Papillomavirus
AIYYKAREMGF

SEQ ID NO: 31675 - protein, 8 aa, Artificial Sequence
  Peptide Derived from Human Papillomavirus
ATHTKAVA

SEQ ID NO: 31676 - protein, 10 aa, Artificial Sequence
  Peptide Derived from Human Papillomavirus
AVSKNKALQA

SEQ ID NO: 31677 - protein, 11 aa, Artificial Sequence
  Peptide Derived from Human Papillomavirus
AVSSTWHWTGH

SEQ ID NO: 31678 - protein, 8 aa, Artificial Sequence
  Peptide Derived from Human Papillomavirus
CAIYYKAR

SEQ ID NO: 31679 - protein, 8 aa, Artificial Sequence
  Peptide Derived from Human Papillomavirus
CLRYRFKK

SEQ ID NO: 31680 - protein, 9 aa, Artificial Sequence
  Peptide Derived from Human Papillomavirus
CLRYRFKKH

SEQ ID NO: 31681 - protein, 9 aa, Artificial Sequence
  Peptide Derived from Human Papillomavirus
DAEKYSKNK

SEQ ID NO: 31682 - protein, 9 aa, Artificial Sequence
  Peptide Derived from Human Papillomavirus
DANTLKCLR

SEQ ID NO: 31683 - protein, 10 aa, Artificial Sequence
  Peptide Derived from Human Papillomavirus
DANTLKCLRY

SEQ ID NO: 31684 - protein, 11 aa, Artificial Sequence
  Peptide Derived from Human Papillomavirus
DANTLKCLRYR

SEQ ID NO: 31685 - protein, 8 aa, Artificial Sequence
  Peptide Derived from Human Papillomavirus
DDAEKYSK

SEQ ID NO: 31686 - protein, 10 aa, Artificial Sequence
  Peptide Derived from Human Papillomavirus
DDAEKYSKNK

SEQ ID NO: 31687 - protein, 9 aa, Artificial Sequence
  Peptide Derived from Human Papillomavirus
DGDICNTMH

SEQ ID NO: 31688 - protein, 10 aa, Artificial Sequence
  Peptide Derived from Human Papillomavirus
DGDICNTMHY

SEQ ID NO: 31689 - protein, 8 aa, Artificial Sequence
  Peptide Derived from Human Papillomavirus
DICNTMHY

SEQ ID NO: 31690 - protein, 8 aa, Artificial Sequence
  Peptide Derived from Human Papillomavirus
DLRDHIDY

SEQ ID NO: 31691 - protein, 10 aa, Artificial Sequence
  Peptide Derived from Human Papillomavirus
DLRDHIDYWK

SEQ ID NO: 31692 - protein, 11 aa, Artificial Sequence
  Peptide Derived from Human Papillomavirus
DLRDHIDYWKH

SEQ ID NO: 31693 - protein, 8 aa, Artificial Sequence
  Peptide Derived from Human Papillomavirus
DSAPILTA

SEQ ID NO: 31694 - protein, 9 aa, Artificial Sequence
  Peptide Derived from Human Papillomavirus
DSAPILTAF

SEQ ID NO: 31695 - protein, 9 aa, Artificial Sequence
  Peptide Derived from Human Papillomavirus
DSEWQRDQF

SEQ ID NO: 31696 - protein, 8 aa, Artificial Sequence
  Peptide Derived from Human Papillomavirus
DSTDLRDH

SEQ ID NO: 31697 - protein, 11 aa, Artificial Sequence
  Peptide Derived from Human Papillomavirus
DSTDLRDHIDY

SEQ ID NO: 31698 - protein, 11 aa, Artificial Sequence
  Peptide Derived from Human Papillomavirus
DSVDSAPILTA

SEQ ID NO: 31699 - protein, 10 aa, Artificial Sequence
  Peptide Derived from Human Papillomavirus
DTGNPCHTTK

SEQ ID NO: 31700 - protein, 10 aa, Artificial Sequence
  Peptide Derived from Human Papillomavirus
DVSLEVYLTA

SEQ ID NO: 31701 - protein, 8 aa, Artificial Sequence
  Peptide Derived from Human Papillomavirus
ECAIYYKA

SEQ ID NO: 31702 - protein, 9 aa, Artificial Sequence
  Peptide Derived from Human Papillomavirus
ECAIYYKAR

SEQ ID NO: 31703 - protein, 10 aa, Artificial Sequence
  Peptide Derived from Human Papillomavirus
EGIRTYFVQF

SEQ ID NO: 31704 - protein, 11 aa, Artificial Sequence
  Peptide Derived from Human Papillomavirus
EGIRTYFVQFK

SEQ ID NO: 31705 - protein, 10 aa, Artificial Sequence
  Peptide Derived from Human Papillomavirus
EGQVDYYGLY

SEQ ID NO: 31706 - protein, 11 aa, Artificial Sequence
  Peptide Derived from Human Papillomavirus
EGQVDYYGLYY

SEQ ID NO: 31707 - protein, 8 aa, Artificial Sequence
  Peptide Derived from Human Papillomavirus
EIIRQHLA

SEQ ID NO: 31708 - protein, 10 aa, Artificial Sequence
  Peptide Derived from Human Papillomavirus
EIIRQHLANH

SEQ ID NO: 31709 - protein, 10 aa, Artificial Sequence
  Peptide Derived from Human Papillomavirus
ELQLTLETIY

SEQ ID NO: 31710 - protein, 9 aa, Artificial Sequence
  Peptide Derived from Human Papillomavirus
EMGFKHINH

SEQ ID NO: 31711 - protein, 8 aa, Artificial Sequence
  Peptide Derived from Human Papillomavirus
ETIYNSQY

SEQ ID NO: 31712 - protein, 8 aa, Artificial Sequence
  Peptide Derived from Human Papillomavirus
ETQTTIQR

SEQ ID NO: 31713 - protein, 10 aa, Artificial Sequence
  Peptide Derived from Human Papillomavirus
ETQTTIQRPR

SEQ ID NO: 31714 - protein, 9 aa, Artificial Sequence
  Peptide Derived from Human Papillomavirus
EVSSPEIIR

SEQ ID NO: 31715 - protein, 11 aa, Artificial Sequence
  Peptide Derived from Human Papillomavirus
EVSSPEIIRQH

SEQ ID NO: 31716 - protein, 10 aa, Artificial Sequence
  Peptide Derived from Human Papillomavirus
FDGDICNTMH

SEQ ID NO: 31717 - protein, 11 aa, Artificial Sequence
  Peptide Derived from Human Papillomavirus
FDGDICNTMHY

SEQ ID NO: 31718 - protein, 9 aa, Artificial Sequence
  Peptide Derived from Human Papillomavirus
FLSQVKIPK

SEQ ID NO: 31719 - protein, 8 aa, Artificial Sequence
  Peptide Derived from Human Papillomavirus
FVQFKDDA

SEQ ID NO: 31720 - protein, 10 aa, Artificial Sequence
  Peptide Derived from Human Papillomavirus
FVQFKDDAEK

SEQ ID NO: 31721 - protein, 11 aa, Artificial Sequence
  Peptide Derived from Human Papillomavirus
FVQFKDDAEKY

SEQ ID NO: 31722 - protein, 8 aa, Artificial Sequence
  Peptide Derived from Human Papillomavirus
GCIKKHGY

SEQ ID NO: 31723 - protein, 10 aa, Artificial Sequence
  Peptide Derived from Human Papillomavirus
GDANTLKCLR

SEQ ID NO: 31724 - protein, 11 aa, Artificial Sequence
  Peptide Derived from Human Papillomavirus
GDANTLKCLRY

SEQ ID NO: 31725 - protein, 8 aa, Artificial Sequence
  Peptide Derived from Human Papillomavirus
GDICNTMH

SEQ ID NO: 31726 - protein, 9 aa, Artificial Sequence
  Peptide Derived from Human Papillomavirus
GDICNTMHY

SEQ ID NO: 31727 - protein, 9 aa, Artificial Sequence
  Peptide Derived from Human Papillomavirus
GIRTYFVQF

SEQ ID NO: 31728 - protein, 10 aa, Artificial Sequence
  Peptide Derived from Human Papillomavirus
GIRTYFVQFK

SEQ ID NO: 31729 - protein, 10 aa, Artificial Sequence
  Peptide Derived from Human Papillomavirus
GLYYVHEGIR

SEQ ID NO: 31730 - protein, 11 aa, Artificial Sequence
  Peptide Derived from Human Papillomavirus
GTEETQTTIQR

SEQ ID NO: 31731 - protein, 9 aa, Artificial Sequence
  Peptide Derived from Human Papillomavirus
HGYTVEVQF

SEQ ID NO: 31732 - protein, 9 aa, Artificial Sequence
  Peptide Derived from Human Papillomavirus
HIDYWKHMR

SEQ ID NO: 31733 - protein, 11 aa, Artificial Sequence
  Peptide Derived from Human Papillomavirus
HINHQVVPTLA

SEQ ID NO: 31734 - protein, 8 aa, Artificial Sequence
  Peptide Derived from Human Papillomavirus
HIYICEEA

SEQ ID NO: 31735 - protein, 8 aa, Artificial Sequence
  Peptide Derived from Human Papillomavirus
HLANHPAA

SEQ ID NO: 31736 - protein, 10 aa, Artificial Sequence
  Peptide Derived from Human Papillomavirus
HLANHPAATH

SEQ ID NO: 31737 - protein, 10 aa, Artificial Sequence
  Peptide Derived from Human Papillomavirus
HLKGDANTLK

SEQ ID NO: 31738 - protein, 9 aa, Artificial Sequence
  Peptide Derived from Human Papillomavirus
HMRLECAIY

SEQ ID NO: 31739 - protein, 10 aa, Artificial Sequence
  Peptide Derived from Human Papillomavirus
HMRLECAIYY

SEQ ID NO: 31740 - protein, 11 aa, Artificial Sequence
  Peptide Derived from Human Papillomavirus
HMRLECAIYYK

SEQ ID NO: 31741 - protein, 8 aa, Artificial Sequence
  Peptide Derived from Human Papillomavirus
HTTKLLHR

SEQ ID NO: 31742 - protein, 8 aa, Artificial Sequence
  Peptide Derived from Human Papillomavirus
IDYWKHMR

SEQ ID NO: 31743 - protein, 9 aa, Artificial Sequence
  Peptide Derived from Human Papillomavirus
IIRQHLANH

SEQ ID NO: 31744 - protein, 11 aa, Artificial Sequence
  Peptide Derived from Human Papillomavirus
IIRQHLANHPA

SEQ ID NO: 31745 - protein, 8 aa, Artificial Sequence
  Peptide Derived from Human Papillomavirus
ILCPTSVF

SEQ ID NO: 31746 - protein, 9 aa, Artificial Sequence
  Peptide Derived from Human Papillomavirus
ILTAFNSSH

SEQ ID NO: 31747 - protein, 10 aa, Artificial Sequence
  Peptide Derived from Human Papillomavirus
ILTAFNSSHK

SEQ ID NO: 31748 - protein, 8 aa, Artificial Sequence
  Peptide Derived from Human Papillomavirus
IVHLKGDA

SEQ ID NO: 31749 - protein, 8 aa, Artificial Sequence
  Peptide Derived from Human Papillomavirus
KAREMGFK

SEQ ID NO: 31750 - protein, 9 aa, Artificial Sequence
  Peptide Derived from Human Papillomavirus
KAREMGFKH

SEQ ID NO: 31751 - protein, 8 aa, Artificial Sequence
  Peptide Derived from Human Papillomavirus
KCLRYRFK

SEQ ID NO: 31752 - protein, 9 aa, Artificial Sequence
  Peptide Derived from Human Papillomavirus
KCLRYRFKK

SEQ ID NO: 31753 - protein, 10 aa, Artificial Sequence
  Peptide Derived from Human Papillomavirus
KCLRYRFKKH

SEQ ID NO: 31754 - protein, 9 aa, Artificial Sequence
  Peptide Derived from Human Papillomavirus
KDDAEKYSK

SEQ ID NO: 31755 - protein, 11 aa, Artificial Sequence
  Peptide Derived from Human Papillomavirus
KDDAEKYSKNK

SEQ ID NO: 31756 - protein, 8 aa, Artificial Sequence
  Peptide Derived from Human Papillomavirus
KGDANTLK

SEQ ID NO: 31757 - protein, 11 aa, Artificial Sequence
  Peptide Derived from Human Papillomavirus
KGDANTLKCLR

SEQ ID NO: 31758 - protein, 11 aa, Artificial Sequence
  Peptide Derived from Human Papillomavirus
KLLHRDSVDSA

SEQ ID NO: 31759 - protein, 9 aa, Artificial Sequence
  Peptide Derived from Human Papillomavirus
KSAIVTLTY

SEQ ID NO: 31760 - protein, 9 aa, Artificial Sequence
  Peptide Derived from Human Papillomavirus
KTITVSTGF

SEQ ID NO: 31761 - protein, 9 aa, Artificial Sequence
  Peptide Derived from Human Papillomavirus
LANHPAATH

SEQ ID NO: 31762 - protein, 11 aa, Artificial Sequence
  Peptide Derived from Human Papillomavirus
LANHPAATHTK

SEQ ID NO: 31763 - protein, 8 aa, Artificial Sequence
  Peptide Derived from Human Papillomavirus
LAVSKNKA

SEQ ID NO: 31764 - protein, 11 aa, Artificial Sequence
  Peptide Derived from Human Papillomavirus
LAVSKNKALQA

SEQ ID NO: 31765 - protein, 11 aa, Artificial Sequence
  Peptide Derived from Human Papillomavirus
LCQRLNVCQDK

SEQ ID NO: 31766 - protein, 10 aa, Artificial Sequence
  Peptide Derived from Human Papillomavirus
LLHRDSVDSA

SEQ ID NO: 31767 - protein, 8 aa, Artificial Sequence
  Peptide Derived from Human Papillomavirus
LSQVKIPK

SEQ ID NO: 31768 - protein, 8 aa, Artificial Sequence
  Peptide Derived from Human Papillomavirus
LTAFNSSH

SEQ ID NO: 31769 - protein, 9 aa, Artificial Sequence
  Peptide Derived from Human Papillomavirus
LTAFNSSHK

SEQ ID NO: 31770 - protein, 11 aa, Artificial Sequence
  Peptide Derived from Human Papillomavirus
LTAFNSSHKGR

SEQ ID NO: 31771 - protein, 9 aa, Artificial Sequence
  Peptide Derived from Human Papillomavirus
LTAPTGCIK

SEQ ID NO: 31772 - protein, 10 aa, Artificial Sequence
  Peptide Derived from Human Papillomavirus
LTAPTGCIKK

SEQ ID NO: 31773 - protein, 11 aa, Artificial Sequence
  Peptide Derived from Human Papillomavirus
LTAPTGCIKKH

SEQ ID NO: 31774 - protein, 11 aa, Artificial Sequence
  Peptide Derived from Human Papillomavirus
LTLETIYNSQY

SEQ ID NO: 31775 - protein, 9 aa, Artificial Sequence
  Peptide Derived from Human Papillomavirus
LTYDSEWQR

SEQ ID NO: 31776 - protein, 8 aa, Artificial Sequence
  Peptide Derived from Human Papillomavirus
MGFKHINH

SEQ ID NO: 31777 - protein, 11 aa, Artificial Sequence
  Peptide Derived from Human Papillomavirus
NCNSNTTPIVH

SEQ ID NO: 31778 - protein, 9 aa, Artificial Sequence
  Peptide Derived from Human Papillomavirus
NDSTDLRDH

SEQ ID NO: 31779 - protein, 9 aa, Artificial Sequence
  Peptide Derived from Human Papillomavirus
NSNTTPIVH

SEQ ID NO: 31780 - protein, 11 aa, Artificial Sequence
  Peptide Derived from Human Papillomavirus
NSNTTPIVHLK

SEQ ID NO: 31781 - protein, 8 aa, Artificial Sequence
  Peptide Derived from Human Papillomavirus
NSQYSNEK

SEQ ID NO: 31782 - protein, 8 aa, Artificial Sequence
  Peptide Derived from Human Papillomavirus
NTLKCLRY

SEQ ID NO: 31783 - protein, 9 aa, Artificial Sequence
  Peptide Derived from Human Papillomavirus
NTLKCLRYR

SEQ ID NO: 31784 - protein, 10 aa, Artificial Sequence
  Peptide Derived from Human Papillomavirus
NTLKCLRYRF

SEQ ID NO: 31785 - protein, 11 aa, Artificial Sequence
  Peptide Derived from Human Papillomavirus
NTLKCLRYRFK

SEQ ID NO: 31786 - protein, 10 aa, Artificial Sequence
  Peptide Derived from Human Papillomavirus
NTMHYTNWTH

SEQ ID NO: 31787 - protein, 9 aa, Artificial Sequence
  Peptide Derived from Human Papillomavirus
NTTPIVHLK

SEQ ID NO: 31788 - protein, 10 aa, Artificial Sequence
  Peptide Derived from Human Papillomavirus
NVCQDKILTH

SEQ ID NO: 31789 - protein, 11 aa, Artificial Sequence
  Peptide Derived from Human Papillomavirus
NVCQDKILTHY

SEQ ID NO: 31790 - protein, 8 aa, Artificial Sequence
  Peptide Derived from Human Papillomavirus
PAATHTKA

SEQ ID NO: 31791 - protein, 10 aa, Artificial Sequence
  Peptide Derived from Human Papillomavirus
PAATHTKAVA

SEQ ID NO: 31792 - protein, 9 aa, Artificial Sequence
  Peptide Derived from Human Papillomavirus
PCHTTKLLH

SEQ ID NO: 31793 - protein, 10 aa, Artificial Sequence
  Peptide Derived from Human Papillomavirus
PCHTTKLLHR

SEQ ID NO: 31794 - protein, 8 aa, Artificial Sequence
  Peptide Derived from Human Papillomavirus
PDTGNPCH

SEQ ID NO: 31795 - protein, 11 aa, Artificial Sequence
  Peptide Derived from Human Papillomavirus
PDTGNPCHTTK

SEQ ID NO: 31796 - protein, 10 aa, Artificial Sequence
  Peptide Derived from Human Papillomavirus
PILTAFNSSH

SEQ ID NO: 31797 - protein, 11 aa, Artificial Sequence
  Peptide Derived from Human Papillomavirus
PILTAFNSSHK

SEQ ID NO: 31798 - protein, 9 aa, Artificial Sequence
  Peptide Derived from Human Papillomavirus
PIVHLKGDA

SEQ ID NO: 31799 - protein, 8 aa, Artificial Sequence
  Peptide Derived from Human Papillomavirus
PTGCIKKH

SEQ ID NO: 31800 - protein, 10 aa, Artificial Sequence
  Peptide Derived from Human Papillomavirus
PTGCIKKHGY

SEQ ID NO: 31801 - protein, 9 aa, Artificial Sequence
  Peptide Derived from Human Papillomavirus
PTLAVSKNK

SEQ ID NO: 31802 - protein, 10 aa, Artificial Sequence
  Peptide Derived from Human Papillomavirus
PTLAVSKNKA

SEQ ID NO: 31803 - protein, 8 aa, Artificial Sequence
  Peptide Derived from Human Papillomavirus
QDKILTHY

SEQ ID NO: 31804 - protein, 8 aa, Artificial Sequence
  Peptide Derived from Human Papillomavirus
QDVSLEVY

SEQ ID NO: 31805 - protein, 11 aa, Artificial Sequence
  Peptide Derived from Human Papillomavirus
QDVSLEVYLTA

SEQ ID NO: 31806 - protein, 11 aa, Artificial Sequence
  Peptide Derived from Human Papillomavirus
QFDGDICNTMH

SEQ ID NO: 31807 - protein, 8 aa, Artificial Sequence
  Peptide Derived from Human Papillomavirus
QFKDDAEK

SEQ ID NO: 31808 - protein, 9 aa, Artificial Sequence
  Peptide Derived from Human Papillomavirus
QFKDDAEKY

SEQ ID NO: 31809 - protein, 11 aa, Artificial Sequence
  Peptide Derived from Human Papillomavirus
QFKDDAEKYSK

SEQ ID NO: 31810 - protein, 10 aa, Artificial Sequence
  Peptide Derived from Human Papillomavirus
QFLSQVKIPK

SEQ ID NO: 31811 - protein, 8 aa, Artificial Sequence
  Peptide Derived from Human Papillomavirus
QLTLETIY

SEQ ID NO: 31812 - protein, 8 aa, Artificial Sequence
  Peptide Derived from Human Papillomavirus
QTTIQRPR

SEQ ID NO: 31813 - protein, 8 aa, Artificial Sequence
  Peptide Derived from Human Papillomavirus
QVDYYGLY

SEQ ID NO: 31814 - protein, 9 aa, Artificial Sequence
  Peptide Derived from Human Papillomavirus
QVDYYGLYY

SEQ ID NO: 31815 - protein, 11 aa, Artificial Sequence
  Peptide Derived from Human Papillomavirus
QVDYYGLYYVH

SEQ ID NO: 31816 - protein, 10 aa, Artificial Sequence
  Peptide Derived from Human Papillomavirus
QVILCPTSVF

SEQ ID NO: 31817 - protein, 10 aa, Artificial Sequence
  Peptide Derived from Human Papillomavirus
QVVPTLAVSK

SEQ ID NO: 31818 - protein, 8 aa, Artificial Sequence
  Peptide Derived from Human Papillomavirus
RDHIDYWK

SEQ ID NO: 31819 - protein, 9 aa, Artificial Sequence
  Peptide Derived from Human Papillomavirus
RDHIDYWKH

SEQ ID NO: 31820 - protein, 11 aa, Artificial Sequence
  Peptide Derived from Human Papillomavirus
RDHIDYWKHMR

SEQ ID NO: 31821 - protein, 9 aa, Artificial Sequence
  Peptide Derived from Human Papillomavirus
RDQFLSQVK

SEQ ID NO: 31822 - protein, 9 aa, Artificial Sequence
  Peptide Derived from Human Papillomavirus
RFKKHCTLY

SEQ ID NO: 31823 - protein, 11 aa, Artificial Sequence
  Peptide Derived from Human Papillomavirus
RFKKHCTLYTA

SEQ ID NO: 31824 - protein, 8 aa, Artificial Sequence
  Peptide Derived from Human Papillomavirus
RLECAIYY

SEQ ID NO: 31825 - protein, 9 aa, Artificial Sequence
  Peptide Derived from Human Papillomavirus
RLECAIYYK

SEQ ID NO: 31826 - protein, 10 aa, Artificial Sequence
  Peptide Derived from Human Papillomavirus
RLECAIYYKA

SEQ ID NO: 31827 - protein, 11 aa, Artificial Sequence
  Peptide Derived from Human Papillomavirus
RLECAIYYKAR

SEQ ID NO: 31828 - protein, 8 aa, Artificial Sequence
  Peptide Derived from Human Papillomavirus
RLNVCQDK

SEQ ID NO: 31829 - protein, 11 aa, Artificial Sequence
  Peptide Derived from Human Papillomavirus
RSEPDTGNPCH

SEQ ID NO: 31830 - protein, 8 aa, Artificial Sequence
  Peptide Derived from Human Papillomavirus
RTYFVQFK

SEQ ID NO: 31831 - protein, 11 aa, Artificial Sequence
  Peptide Derived from Human Papillomavirus
RTYFVQFKDDA

SEQ ID NO: 31832 - protein, 8 aa, Artificial Sequence
  Peptide Derived from Human Papillomavirus
SAIVTLTY

SEQ ID NO: 31833 - protein, 8 aa, Artificial Sequence
  Peptide Derived from Human Papillomavirus
SAPILTAF

SEQ ID NO: 31834 - protein, 8 aa, Artificial Sequence
  Peptide Derived from Human Papillomavirus
SLEVYLTA

SEQ ID NO: 31835 - protein, 9 aa, Artificial Sequence
  Peptide Derived from Human Papillomavirus
SSPEIIRQH

SEQ ID NO: 31836 - protein, 11 aa, Artificial Sequence
  Peptide Derived from Human Papillomavirus
SSPEIIRQHLA

SEQ ID NO: 31837 - protein, 9 aa, Artificial Sequence
  Peptide Derived from Human Papillomavirus
SSTWHWTGH

SEQ ID NO: 31838 - protein, 10 aa, Artificial Sequence
  Peptide Derived from Human Papillomavirus
STDLRDHIDY

SEQ ID NO: 31839 - protein, 8 aa, Artificial Sequence
  Peptide Derived from Human Papillomavirus
STWHWTGH

SEQ ID NO: 31840 - protein, 11 aa, Artificial Sequence
  Peptide Derived from Human Papillomavirus
STWHWTGHNVK

SEQ ID NO: 31841 - protein, 10 aa, Artificial Sequence
  Peptide Derived from Human Papillomavirus
SVDSAPILTA

SEQ ID NO: 31842 - protein, 11 aa, Artificial Sequence
  Peptide Derived from Human Papillomavirus
SVDSAPILTAF

SEQ ID NO: 31843 - protein, 11 aa, Artificial Sequence
  Peptide Derived from Human Papillomavirus
SVTVVEGQVDY

SEQ ID NO: 31844 - protein, 8 aa, Artificial Sequence
  Peptide Derived from Human Papillomavirus
TAFNSSHK

SEQ ID NO: 31845 - protein, 10 aa, Artificial Sequence
  Peptide Derived from Human Papillomavirus
TAFNSSHKGR

SEQ ID NO: 31846 - protein, 8 aa, Artificial Sequence
  Peptide Derived from Human Papillomavirus
TAPTGCIK

SEQ ID NO: 31847 - protein, 9 aa, Artificial Sequence
  Peptide Derived from Human Papillomavirus
TAPTGCIKK

SEQ ID NO: 31848 - protein, 10 aa, Artificial Sequence
  Peptide Derived from Human Papillomavirus
TAPTGCIKKH

SEQ ID NO: 31849 - protein, 8 aa, Artificial Sequence
  Peptide Derived from Human Papillomavirus
TAVSSTWH

SEQ ID NO: 31850 - protein, 9 aa, Artificial Sequence
  Peptide Derived from Human Papillomavirus
TDLRDHIDY

SEQ ID NO: 31851 - protein, 11 aa, Artificial Sequence
  Peptide Derived from Human Papillomavirus
TDLRDHIDYWK

SEQ ID NO: 31852 - protein, 9 aa, Artificial Sequence
  Peptide Derived from Human Papillomavirus
TGCIKKHGY

SEQ ID NO: 31853 - protein, 8 aa, Artificial Sequence
  Peptide Derived from Human Papillomavirus
TGHNVKHK

SEQ ID NO: 31854 - protein, 10 aa, Artificial Sequence
  Peptide Derived from Human Papillomavirus
TGHNVKHKSA

SEQ ID NO: 31855 - protein, 9 aa, Artificial Sequence
  Peptide Derived from Human Papillomavirus
TGNPCHTTK

SEQ ID NO: 31856 - protein, 8 aa, Artificial Sequence
  Peptide Derived from Human Papillomavirus
TITVSTGF

SEQ ID NO: 31857 - protein, 11 aa, Artificial Sequence
  Peptide Derived from Human Papillomavirus
TIYNSQYSNEK

SEQ ID NO: 31858 - protein, 8 aa, Artificial Sequence
  Peptide Derived from Human Papillomavirus
TLAVSKNK

SEQ ID NO: 31859 - protein, 9 aa, Artificial Sequence
  Peptide Derived from Human Papillomavirus
TLAVSKNKA

SEQ ID NO: 31860 - protein, 10 aa, Artificial Sequence
  Peptide Derived from Human Papillomavirus
TLETIYNSQY

SEQ ID NO: 31861 - protein, 8 aa, Artificial Sequence
  Peptide Derived from Human Papillomavirus
TLKCLRYR

SEQ ID NO: 31862 - protein, 9 aa, Artificial Sequence
  Peptide Derived from Human Papillomavirus
TLKCLRYRF

SEQ ID NO: 31863 - protein, 10 aa, Artificial Sequence
  Peptide Derived from Human Papillomavirus
TLKCLRYRFK

SEQ ID NO: 31864 - protein, 11 aa, Artificial Sequence
  Peptide Derived from Human Papillomavirus
TLKCLRYRFKK

SEQ ID NO: 31865 - protein, 10 aa, Artificial Sequence
  Peptide Derived from Human Papillomavirus
TLQDVSLEVY

SEQ ID NO: 31866 - protein, 10 aa, Artificial Sequence
  Peptide Derived from Human Papillomavirus
TLTYDSEWQR

SEQ ID NO: 31867 - protein, 11 aa, Artificial Sequence
  Peptide Derived from Human Papillomavirus
TLYTAVSSTWH

SEQ ID NO: 31868 - protein, 9 aa, Artificial Sequence
  Peptide Derived from Human Papillomavirus
TMHYTNWTH

SEQ ID NO: 31869 - protein, 11 aa, Artificial Sequence
  Peptide Derived from Human Papillomavirus
TMHYTNWTHIY

SEQ ID NO: 31870 - protein, 8 aa, Artificial Sequence
  Peptide Derived from Human Papillomavirus
TTPIVHLK

SEQ ID NO: 31871 - protein, 11 aa, Artificial Sequence
  Peptide Derived from Human Papillomavirus
TTPIVHLKGDA

SEQ ID NO: 31872 - protein, 9 aa, Artificial Sequence
  Peptide Derived from Human Papillomavirus
TVVEGQVDY

SEQ ID NO: 31873 - protein, 10 aa, Artificial Sequence
  Peptide Derived from Human Papillomavirus
TVVEGQVDYY

SEQ ID NO: 31874 - protein, 9 aa, Artificial Sequence
  Peptide Derived from Human Papillomavirus
VCQDKILTH

SEQ ID NO: 31875 - protein, 10 aa, Artificial Sequence
  Peptide Derived from Human Papillomavirus
VCQDKILTHY

SEQ ID NO: 31876 - protein, 9 aa, Artificial Sequence
  Peptide Derived from Human Papillomavirus
VDSAPILTA

SEQ ID NO: 31877 - protein, 10 aa, Artificial Sequence
  Peptide Derived from Human Papillomavirus
VDSAPILTAF

SEQ ID NO: 31878 - protein, 8 aa, Artificial Sequence
  Peptide Derived from Human Papillomavirus
VDYYGLYY

SEQ ID NO: 31879 - protein, 10 aa, Artificial Sequence
  Peptide Derived from Human Papillomavirus
VDYYGLYYVH

SEQ ID NO: 31880 - protein, 9 aa, Artificial Sequence
  Peptide Derived from Human Papillomavirus
VILCPTSVF

SEQ ID NO: 31881 - protein, 9 aa, Artificial Sequence
  Peptide Derived from Human Papillomavirus
VSKNKALQA

SEQ ID NO: 31882 - protein, 9 aa, Artificial Sequence
  Peptide Derived from Human Papillomavirus
VSLEVYLTA

SEQ ID NO: 31883 - protein, 8 aa, Artificial Sequence
  Peptide Derived from Human Papillomavirus
VSSPEIIR

SEQ ID NO: 31884 - protein, 10 aa, Artificial Sequence
  Peptide Derived from Human Papillomavirus
VSSPEIIRQH

SEQ ID NO: 31885 - protein, 10 aa, Artificial Sequence
  Peptide Derived from Human Papillomavirus
VSSTWHWTGH

SEQ ID NO: 31886 - protein, 11 aa, Artificial Sequence
  Peptide Derived from Human Papillomavirus
VTLTYDSEWQR

SEQ ID NO: 31887 - protein, 10 aa, Artificial Sequence
  Peptide Derived from Human Papillomavirus
VTVVEGQVDY

SEQ ID NO: 31888 - protein, 11 aa, Artificial Sequence
  Peptide Derived from Human Papillomavirus
VTVVEGQVDYY

SEQ ID NO: 31889 - protein, 8 aa, Artificial Sequence
  Peptide Derived from Human Papillomavirus
VVEGQVDY

SEQ ID NO: 31890 - protein, 9 aa, Artificial Sequence
  Peptide Derived from Human Papillomavirus
VVEGQVDYY

SEQ ID NO: 31891 - protein, 9 aa, Artificial Sequence
  Peptide Derived from Human Papillomavirus
VVPTLAVSK

SEQ ID NO: 31892 - protein, 11 aa, Artificial Sequence
  Peptide Derived from Human Papillomavirus
VVPTLAVSKNK

SEQ ID NO: 31893 - protein, 8 aa, Artificial Sequence
  Peptide Derived from Human Papillomavirus
WTGHNVKH

SEQ ID NO: 31894 - protein, 9 aa, Artificial Sequence
  Peptide Derived from Human Papillomavirus
WTGHNVKHK

SEQ ID NO: 31895 - protein, 11 aa, Artificial Sequence
  Peptide Derived from Human Papillomavirus
WTGHNVKHKSA

SEQ ID NO: 31896 - protein, 10 aa, Artificial Sequence
  Peptide Derived from Human Papillomavirus
WTHIYICEEA

SEQ ID NO: 31897 - protein, 11 aa, Artificial Sequence
  Peptide Derived from Human Papillomavirus
WTLQDVSLEVY

SEQ ID NO: 31898 - protein, 10 aa, Artificial Sequence
  Peptide Derived from Human Papillomavirus
YDSEWQRDQF

SEQ ID NO: 31899 - protein, 9 aa, Artificial Sequence
  Peptide Derived from Human Papillomavirus
YFVQFKDDA

SEQ ID NO: 31900 - protein, 11 aa, Artificial Sequence
  Peptide Derived from Human Papillomavirus
YFVQFKDDAEK

SEQ ID NO: 31901 - protein, 11 aa, Artificial Sequence
  Peptide Derived from Human Papillomavirus
YGLYYVHEGIR

SEQ ID NO: 31902 - protein, 10 aa, Artificial Sequence
  Peptide Derived from Human Papillomavirus
YLTAPTGCIK

SEQ ID NO: 31903 - protein, 11 aa, Artificial Sequence
  Peptide Derived from Human Papillomavirus
YLTAPTGCIKK

SEQ ID NO: 31904 - protein, 10 aa, Artificial Sequence
  Peptide Derived from Human Papillomavirus
YSKNKVWEVH

SEQ ID NO: 31905 - protein, 11 aa, Artificial Sequence
  Peptide Derived from Human Papillomavirus
YSKNKVWEVHA

SEQ ID NO: 31906 - protein, 9 aa, Artificial Sequence
  Peptide Derived from Human Papillomavirus
YTAVSSTWH

SEQ ID NO: 31907 - protein, 8 aa, Artificial Sequence
  Peptide Derived from Human Papillomavirus
YTNWTHIY

SEQ ID NO: 31908 - protein, 9 aa, Artificial Sequence
  Peptide Derived from Human Papillomavirus
YVHEGIRTY

SEQ ID NO: 31909 - protein, 10 aa, Artificial Sequence
  Peptide Derived from Human Papillomavirus
YVHEGIRTYF

SEQ ID NO: 31910 - protein, 8 aa, Artificial Sequence
  Peptide Derived from Human Papillomavirus
AASAFRCF

SEQ ID NO: 31911 - protein, 11 aa, Artificial Sequence
  Peptide Derived from Human Papillomavirus
AASAFRCFIVY

SEQ ID NO: 31912 - protein, 8 aa, Artificial Sequence
  Peptide Derived from Human Papillomavirus
AFRCFIVY

SEQ ID NO: 31913 - protein, 11 aa, Artificial Sequence
  Peptide Derived from Human Papillomavirus
AFRCFIVYIIF

SEQ ID NO: 31914 - protein, 10 aa, Artificial Sequence
  Peptide Derived from Human Papillomavirus
ASAFRCFIVY

SEQ ID NO: 31915 - protein, 9 aa, Artificial Sequence
  Peptide Derived from Human Papillomavirus
ASTTLLACF

SEQ ID NO: 31916 - protein, 8 aa, Artificial Sequence
  Peptide Derived from Human Papillomavirus
CFIVYIIF

SEQ ID NO: 31917 - protein, 10 aa, Artificial Sequence
  Peptide Derived from Human Papillomavirus
CFIVYIIFVY

SEQ ID NO: 31918 - protein, 11 aa, Artificial Sequence
  Peptide Derived from Human Papillomavirus
CVLLCVCLLIR

SEQ ID NO: 31919 - protein, 9 aa, Artificial Sequence
  Peptide Derived from Human Papillomavirus
DTASTTLLA

SEQ ID NO: 31920 - protein, 11 aa, Artificial Sequence
  Peptide Derived from Human Papillomavirus
DTASTTLLACF

SEQ ID NO: 31921 - protein, 9 aa, Artificial Sequence
  Peptide Derived from Human Papillomavirus
FIVYIIFVY

SEQ ID NO: 31922 - protein, 8 aa, Artificial Sequence
  Peptide Derived from Human Papillomavirus
FLIHTHAR

SEQ ID NO: 31923 - protein, 9 aa, Artificial Sequence
  Peptide Derived from Human Papillomavirus
FLIHTHARF

SEQ ID NO: 31924 - protein, 10 aa, Artificial Sequence
  Peptide Derived from Human Papillomavirus
FVYIPLFLIH

SEQ ID NO: 31925 - protein, 8 aa, Artificial Sequence
  Peptide Derived from Human Papillomavirus
IFVYIPLF

SEQ ID NO: 31926 - protein, 11 aa, Artificial Sequence
  Peptide Derived from Human Papillomavirus
IFVYIPLFLIH

SEQ ID NO: 31927 - protein, 9 aa, Artificial Sequence
  Peptide Derived from Human Papillomavirus
IIFVYIPLF

SEQ ID NO: 31928 - protein, 11 aa, Artificial Sequence
  Peptide Derived from Human Papillomavirus
IILVLLLWITA

SEQ ID NO: 31929 - protein, 10 aa, Artificial Sequence
  Peptide Derived from Human Papillomavirus
ILVLLLWITA

SEQ ID NO: 31930 - protein, 11 aa, Artificial Sequence
  Peptide Derived from Human Papillomavirus
ILVLLLWITAA

SEQ ID NO: 31931 - protein, 8 aa, Artificial Sequence
  Peptide Derived from Human Papillomavirus
ITAASAFR

SEQ ID NO: 31932 - protein, 10 aa, Artificial Sequence
  Peptide Derived from Human Papillomavirus
ITAASAFRCF

SEQ ID NO: 31933 - protein, 8 aa, Artificial Sequence
  Peptide Derived from Human Papillomavirus
IVYIIFVY

SEQ ID NO: 31934 - protein, 8 aa, Artificial Sequence
  Peptide Derived from Human Papillomavirus
LACFLLCF

SEQ ID NO: 31935 - protein, 8 aa, Artificial Sequence
  Peptide Derived from Human Papillomavirus
LCVCLLIR

SEQ ID NO: 31936 - protein, 10 aa, Artificial Sequence
  Peptide Derived from Human Papillomavirus
LDTASTTLLA

SEQ ID NO: 31937 - protein, 8 aa, Artificial Sequence
  Peptide Derived from Human Papillomavirus
LFLIHTHA

SEQ ID NO: 31938 - protein, 9 aa, Artificial Sequence
  Peptide Derived from Human Papillomavirus
LFLIHTHAR

SEQ ID NO: 31939 - protein, 10 aa, Artificial Sequence
  Peptide Derived from Human Papillomavirus
LFLIHTHARF

SEQ ID NO: 31940 - protein, 8 aa, Artificial Sequence
  Peptide Derived from Human Papillomavirus
LIHTHARF

SEQ ID NO: 31941 - protein, 9 aa, Artificial Sequence
  Peptide Derived from Human Papillomavirus
LLACFLLCF

SEQ ID NO: 31942 - protein, 9 aa, Artificial Sequence
  Peptide Derived from Human Papillomavirus
LLCVCLLIR

SEQ ID NO: 31943 - protein, 8 aa, Artificial Sequence
  Peptide Derived from Human Papillomavirus
LLLSVSTY

SEQ ID NO: 31944 - protein, 8 aa, Artificial Sequence
  Peptide Derived from Human Papillomavirus
LLLWITAA

SEQ ID NO: 31945 - protein, 10 aa, Artificial Sequence
  Peptide Derived from Human Papillomavirus
LLLWITAASA

SEQ ID NO: 31946 - protein, 11 aa, Artificial Sequence
  Peptide Derived from Human Papillomavirus
LLLWITAASAF

SEQ ID NO: 31947 - protein, 9 aa, Artificial Sequence
  Peptide Derived from Human Papillomavirus
LLWITAASA

SEQ ID NO: 31948 - protein, 10 aa, Artificial Sequence
  Peptide Derived from Human Papillomavirus
LLWITAASAF

SEQ ID NO: 31949 - protein, 11 aa, Artificial Sequence
  Peptide Derived from Human Papillomavirus
LLWITAASAFR

SEQ ID NO: 31950 - protein, 9 aa, Artificial Sequence
  Peptide Derived from Human Papillomavirus
LVLLLWITA

SEQ ID NO: 31951 - protein, 10 aa, Artificial Sequence
  Peptide Derived from Human Papillomavirus
LVLLLWITAA

SEQ ID NO: 31952 - protein, 11 aa, Artificial Sequence
  Peptide Derived from Human Papillomavirus
NLDTASTTLLA

SEQ ID NO: 31953 - protein, 8 aa, Artificial Sequence
  Peptide Derived from Human Papillomavirus
PLFLIHTH

SEQ ID NO: 31954 - protein, 9 aa, Artificial Sequence
  Peptide Derived from Human Papillomavirus
PLFLIHTHA

SEQ ID NO: 31955 - protein, 10 aa, Artificial Sequence
  Peptide Derived from Human Papillomavirus
PLFLIHTHAR

SEQ ID NO: 31956 - protein, 11 aa, Artificial Sequence
  Peptide Derived from Human Papillomavirus
PLFLIHTHARF

SEQ ID NO: 31957 - protein, 9 aa, Artificial Sequence
  Peptide Derived from Human Papillomavirus
PLLLSVSTY

SEQ ID NO: 31958 - protein, 9 aa, Artificial Sequence
  Peptide Derived from Human Papillomavirus
RCFIVYIIF

SEQ ID NO: 31959 - protein, 11 aa, Artificial Sequence
  Peptide Derived from Human Papillomavirus
RCFIVYIIFVY

SEQ ID NO: 31960 - protein, 9 aa, Artificial Sequence
  Peptide Derived from Human Papillomavirus
SAFRCFIVY

SEQ ID NO: 31961 - protein, 8 aa, Artificial Sequence
  Peptide Derived from Human Papillomavirus
STTLLACF

SEQ ID NO: 31962 - protein, 9 aa, Artificial Sequence
  Peptide Derived from Human Papillomavirus
TAASAFRCF

SEQ ID NO: 31963 - protein, 8 aa, Artificial Sequence
  Peptide Derived from Human Papillomavirus
TASTTLLA

SEQ ID NO: 31964 - protein, 10 aa, Artificial Sequence
  Peptide Derived from Human Papillomavirus
TASTTLLACF

SEQ ID NO: 31965 - protein, 10 aa, Artificial Sequence
  Peptide Derived from Human Papillomavirus
TLLACFLLCF

SEQ ID NO: 31966 - protein, 11 aa, Artificial Sequence
  Peptide Derived from Human Papillomavirus
TTLLACFLLCF

SEQ ID NO: 31967 - protein, 10 aa, Artificial Sequence
  Peptide Derived from Human Papillomavirus
VLLCVCLLIR

SEQ ID NO: 31968 - protein, 8 aa, Artificial Sequence
  Peptide Derived from Human Papillomavirus
VLLLWITA

SEQ ID NO: 31969 - protein, 9 aa, Artificial Sequence
  Peptide Derived from Human Papillomavirus
VLLLWITAA

SEQ ID NO: 31970 - protein, 11 aa, Artificial Sequence
  Peptide Derived from Human Papillomavirus
VLLLWITAASA

SEQ ID NO: 31971 - protein, 8 aa, Artificial Sequence
  Peptide Derived from Human Papillomavirus
WITAASAF

SEQ ID NO: 31972 - protein, 9 aa, Artificial Sequence
  Peptide Derived from Human Papillomavirus
WITAASAFR

SEQ ID NO: 31973 - protein, 11 aa, Artificial Sequence
  Peptide Derived from Human Papillomavirus
WITAASAFRCF

SEQ ID NO: 31974 - protein, 10 aa, Artificial Sequence
  Peptide Derived from Human Papillomavirus
YIIFVYIPLF

SEQ ID NO: 31975 - protein, 8 aa, Artificial Sequence
  Peptide Derived from Human Papillomavirus
YIPLFLIH

SEQ ID NO: 31976 - protein, 10 aa, Artificial Sequence
  Peptide Derived from Human Papillomavirus
YIPLFLIHTH

SEQ ID NO: 31977 - protein, 11 aa, Artificial Sequence
  Peptide Derived from Human Papillomavirus
YIPLFLIHTHA

SEQ ID NO: 31978 - protein, 9 aa, Artificial Sequence
  Peptide Derived from Human Papillomavirus
AFRDLCIVY

SEQ ID NO: 31979 - protein, 10 aa, Artificial Sequence
  Peptide Derived from Human Papillomavirus
AFRDLCIVYR

SEQ ID NO: 31980 - protein, 9 aa, Artificial Sequence
  Peptide Derived from Human Papillomavirus
AMFQDPQER

SEQ ID NO: 31981 - protein, 11 aa, Artificial Sequence
  Peptide Derived from Human Papillomavirus
AMFQDPQERPR

SEQ ID NO: 31982 - protein, 8 aa, Artificial Sequence
  Peptide Derived from Human Papillomavirus
AVCDKCLK

SEQ ID NO: 31983 - protein, 9 aa, Artificial Sequence
  Peptide Derived from Human Papillomavirus
AVCDKCLKF

SEQ ID NO: 31984 - protein, 10 aa, Artificial Sequence
  Peptide Derived from Human Papillomavirus
AVCDKCLKFY

SEQ ID NO: 31985 - protein, 8 aa, Artificial Sequence
  Peptide Derived from Human Papillomavirus
CCRSSRTR

SEQ ID NO: 31986 - protein, 9 aa, Artificial Sequence
  Peptide Derived from Human Papillomavirus
CCRSSRTRR

SEQ ID NO: 31987 - protein, 8 aa, Artificial Sequence
  Peptide Derived from Human Papillomavirus
CDKCLKFY

SEQ ID NO: 31988 - protein, 10 aa, Artificial Sequence
  Peptide Derived from Human Papillomavirus
CDKCLKFYSK

SEQ ID NO: 31989 - protein, 10 aa, Artificial Sequence
  Peptide Derived from Human Papillomavirus
CIVYRDGNPY

SEQ ID NO: 31990 - protein, 11 aa, Artificial Sequence
  Peptide Derived from Human Papillomavirus
CIVYRDGNPYA

SEQ ID NO: 31991 - protein, 11 aa, Artificial Sequence
  Peptide Derived from Human Papillomavirus
CLKFYSKISEY

SEQ ID NO: 31992 - protein, 9 aa, Artificial Sequence
  Peptide Derived from Human Papillomavirus
CMSCCRSSR

SEQ ID NO: 31993 - protein, 11 aa, Artificial Sequence
  Peptide Derived from Human Papillomavirus
CMSCCRSSRTR

SEQ ID NO: 31994 - protein, 9 aa, Artificial Sequence
  Peptide Derived from Human Papillomavirus
CTELQTTIH

SEQ ID NO: 31995 - protein, 10 aa, Artificial Sequence
  Peptide Derived from Human Papillomavirus
CVYCKQQLLR

SEQ ID NO: 31996 - protein, 11 aa, Artificial Sequence
  Peptide Derived from Human Papillomavirus
CVYCKQQLLRR

SEQ ID NO: 31997 - protein, 11 aa, Artificial Sequence
  Peptide Derived from Human Papillomavirus
DFAFRDLCIVY

SEQ ID NO: 31998 - protein, 10 aa, Artificial Sequence
  Peptide Derived from Human Papillomavirus
DGNPYAVCDK

SEQ ID NO: 31999 - protein, 8 aa, Artificial Sequence
  Peptide Derived from Human Papillomavirus
DIILECVY

SEQ ID NO: 32000 - protein, 10 aa, Artificial Sequence
  Peptide Derived from Human Papillomavirus
DIILECVYCK

SEQ ID NO: 32001 - protein, 11 aa, Artificial Sequence
  Peptide Derived from Human Papillomavirus
DLLIRCINCQK

SEQ ID NO: 32002 - protein, 11 aa, Artificial Sequence
  Peptide Derived from Human Papillomavirus
ECVYCKQQLLR

SEQ ID NO: 32003 - protein, 8 aa, Artificial Sequence
  Peptide Derived from Human Papillomavirus
EVYDFAFR

SEQ ID NO: 32004 - protein, 10 aa, Artificial Sequence
  Peptide Derived from Human Papillomavirus
FAFRDLCIVY

SEQ ID NO: 32005 - protein, 11 aa, Artificial Sequence
  Peptide Derived from Human Papillomavirus
FAFRDLCIVYR

SEQ ID NO: 32006 - protein, 8 aa, Artificial Sequence
  Peptide Derived from Human Papillomavirus
GTTLEQQY

SEQ ID NO: 32007 - protein, 10 aa, Artificial Sequence
  Peptide Derived from Human Papillomavirus
GTTLEQQYNK

SEQ ID NO: 32008 - protein, 9 aa, Artificial Sequence
  Peptide Derived from Human Papillomavirus
HDIILECVY

SEQ ID NO: 32009 - protein, 11 aa, Artificial Sequence
  Peptide Derived from Human Papillomavirus
HDIILECVYCK

SEQ ID NO: 32010 - protein, 8 aa, Artificial Sequence
  Peptide Derived from Human Papillomavirus
HLDKKQRF

SEQ ID NO: 32011 - protein, 9 aa, Artificial Sequence
  Peptide Derived from Human Papillomavirus
HLDKKQRFH

SEQ ID NO: 32012 - protein, 9 aa, Artificial Sequence
  Peptide Derived from Human Papillomavirus
IILECVYCK

SEQ ID NO: 32013 - protein, 8 aa, Artificial Sequence
  Peptide Derived from Human Papillomavirus
ILECVYCK

SEQ ID NO: 32014 - protein, 9 aa, Artificial Sequence
  Peptide Derived from Human Papillomavirus
ISEYRHYCY

SEQ ID NO: 32015 - protein, 9 aa, Artificial Sequence
  Peptide Derived from Human Papillomavirus
IVYRDGNPY

SEQ ID NO: 32016 - protein, 10 aa, Artificial Sequence
  Peptide Derived from Human Papillomavirus
IVYRDGNPYA

SEQ ID NO: 32017 - protein, 8 aa, Artificial Sequence
  Peptide Derived from Human Papillomavirus
KCLKFYSK

SEQ ID NO: 32018 - protein, 9 aa, Artificial Sequence
  Peptide Derived from Human Papillomavirus
KFYSKISEY

SEQ ID NO: 32019 - protein, 10 aa, Artificial Sequence
  Peptide Derived from Human Papillomavirus
KFYSKISEYR

SEQ ID NO: 32020 - protein, 11 aa, Artificial Sequence
  Peptide Derived from Human Papillomavirus
KFYSKISEYRH

SEQ ID NO: 32021 - protein, 8 aa, Artificial Sequence
  Peptide Derived from Human Papillomavirus
KISEYRHY

SEQ ID NO: 32022 - protein, 10 aa, Artificial Sequence
  Peptide Derived from Human Papillomavirus
KISEYRHYCY

SEQ ID NO: 32023 - protein, 11 aa, Artificial Sequence
  Peptide Derived from Human Papillomavirus
LCIVYRDGNPY

SEQ ID NO: 32024 - protein, 8 aa, Artificial Sequence
  Peptide Derived from Human Papillomavirus
LCPEEKQR

SEQ ID NO: 32025 - protein, 9 aa, Artificial Sequence
  Peptide Derived from Human Papillomavirus
LCPEEKQRH

SEQ ID NO: 32026 - protein, 10 aa, Artificial Sequence
  Peptide Derived from Human Papillomavirus
LCTELQTTIH

SEQ ID NO: 32027 - protein, 8 aa, Artificial Sequence
  Peptide Derived from Human Papillomavirus
LDKKQRFH

SEQ ID NO: 32028 - protein, 11 aa, Artificial Sequence
  Peptide Derived from Human Papillomavirus
LDKKQRFHNIR

SEQ ID NO: 32029 - protein, 9 aa, Artificial Sequence
  Peptide Derived from Human Papillomavirus
LIRCINCQK

SEQ ID NO: 32030 - protein, 10 aa, Artificial Sequence
  Peptide Derived from Human Papillomavirus
LLIRCINCQK

SEQ ID NO: 32031 - protein, 9 aa, Artificial Sequence
  Peptide Derived from Human Papillomavirus
LLRREVYDF

SEQ ID NO: 32032 - protein, 10 aa, Artificial Sequence
  Peptide Derived from Human Papillomavirus
LLRREVYDFA

SEQ ID NO: 32033 - protein, 11 aa, Artificial Sequence
  Peptide Derived from Human Papillomavirus
LLRREVYDFAF

SEQ ID NO: 32034 - protein, 8 aa, Artificial Sequence
  Peptide Derived from Human Papillomavirus
MFQDPQER

SEQ ID NO: 32035 - protein, 10 aa, Artificial Sequence
  Peptide Derived from Human Papillomavirus
MFQDPQERPR

SEQ ID NO: 32036 - protein, 11 aa, Artificial Sequence
  Peptide Derived from Human Papillomavirus
MFQDPQERPRK

SEQ ID NO: 32037 - protein, 8 aa, Artificial Sequence
  Peptide Derived from Human Papillomavirus
MSCCRSSR

SEQ ID NO: 32038 - protein, 10 aa, Artificial Sequence
  Peptide Derived from Human Papillomavirus
MSCCRSSRTR

SEQ ID NO: 32039 - protein, 11 aa, Artificial Sequence
  Peptide Derived from Human Papillomavirus
MSCCRSSRTRR

SEQ ID NO: 32040 - protein, 11 aa, Artificial Sequence
  Peptide Derived from Human Papillomavirus
NCQKPLCPEEK

SEQ ID NO: 32041 - protein, 9 aa, Artificial Sequence
  Peptide Derived from Human Papillomavirus
NIRGRWTGR

SEQ ID NO: 32042 - protein, 8 aa, Artificial Sequence
  Peptide Derived from Human Papillomavirus
PLCDLLIR

SEQ ID NO: 32043 - protein, 9 aa, Artificial Sequence
  Peptide Derived from Human Papillomavirus
PLCPEEKQR

SEQ ID NO: 32044 - protein, 10 aa, Artificial Sequence
  Peptide Derived from Human Papillomavirus
PLCPEEKQRH

SEQ ID NO: 32045 - protein, 8 aa, Artificial Sequence
  Peptide Derived from Human Papillomavirus
QDPQERPR

SEQ ID NO: 32046 - protein, 9 aa, Artificial Sequence
  Peptide Derived from Human Papillomavirus
QDPQERPRK

SEQ ID NO: 32047 - protein, 11 aa, Artificial Sequence
  Peptide Derived from Human Papillomavirus
QLCTELQTTIH

SEQ ID NO: 32048 - protein, 8 aa, Artificial Sequence
  Peptide Derived from Human Papillomavirus
QLLRREVY

SEQ ID NO: 32049 - protein, 10 aa, Artificial Sequence
  Peptide Derived from Human Papillomavirus
QLLRREVYDF

SEQ ID NO: 32050 - protein, 11 aa, Artificial Sequence
  Peptide Derived from Human Papillomavirus
QLLRREVYDFA

SEQ ID NO: 32051 - protein, 10 aa, Artificial Sequence
  Peptide Derived from Human Papillomavirus
RCMSCCRSSR

SEQ ID NO: 32052 - protein, 11 aa, Artificial Sequence
  Peptide Derived from Human Papillomavirus
RDGNPYAVCDK

SEQ ID NO: 32053 - protein, 8 aa, Artificial Sequence
  Peptide Derived from Human Papillomavirus
RDLCIVYR

SEQ ID NO: 32054 - protein, 8 aa, Artificial Sequence
  Peptide Derived from Human Papillomavirus
RFHNIRGR

SEQ ID NO: 32055 - protein, 11 aa, Artificial Sequence
  Peptide Derived from Human Papillomavirus
RTAMFQDPQER

SEQ ID NO: 32056 - protein, 9 aa, Artificial Sequence
  Peptide Derived from Human Papillomavirus
SCCRSSRTR

SEQ ID NO: 32057 - protein, 10 aa, Artificial Sequence
  Peptide Derived from Human Papillomavirus
SCCRSSRTRR

SEQ ID NO: 32058 - protein, 11 aa, Artificial Sequence
  Peptide Derived from Human Papillomavirus
SLYGTTLEQQY

SEQ ID NO: 32059 - protein, 10 aa, Artificial Sequence
  Peptide Derived from Human Papillomavirus
TAMFQDPQER

SEQ ID NO: 32060 - protein, 9 aa, Artificial Sequence
  Peptide Derived from Human Papillomavirus
TGRCMSCCR

SEQ ID NO: 32061 - protein, 11 aa, Artificial Sequence
  Peptide Derived from Human Papillomavirus
TIHDIILECVY

SEQ ID NO: 32062 - protein, 8 aa, Artificial Sequence
  Peptide Derived from Human Papillomavirus
TLEQQYNK

SEQ ID NO: 32063 - protein, 9 aa, Artificial Sequence
  Peptide Derived from Human Papillomavirus
TTLEQQYNK

SEQ ID NO: 32064 - protein, 8 aa, Artificial Sequence
  Peptide Derived from Human Papillomavirus
VCDKCLKF

SEQ ID NO: 32065 - protein, 9 aa, Artificial Sequence
  Peptide Derived from Human Papillomavirus
VCDKCLKFY

SEQ ID NO: 32066 - protein, 11 aa, Artificial Sequence
  Peptide Derived from Human Papillomavirus
VCDKCLKFYSK

SEQ ID NO: 32067 - protein, 10 aa, Artificial Sequence
  Peptide Derived from Human Papillomavirus
WTGRCMSCCR

SEQ ID NO: 32068 - protein, 9 aa, Artificial Sequence
  Peptide Derived from Human Papillomavirus
YAVCDKCLK

SEQ ID NO: 32069 - protein, 10 aa, Artificial Sequence
  Peptide Derived from Human Papillomavirus
YAVCDKCLKF

SEQ ID NO: 32070 - protein, 11 aa, Artificial Sequence
  Peptide Derived from Human Papillomavirus
YAVCDKCLKFY

SEQ ID NO: 32071 - protein, 8 aa, Artificial Sequence
  Peptide Derived from Human Papillomavirus
YCKQQLLR

SEQ ID NO: 32072 - protein, 9 aa, Artificial Sequence
  Peptide Derived from Human Papillomavirus
YCKQQLLRR

SEQ ID NO: 32073 - protein, 9 aa, Artificial Sequence
  Peptide Derived from Human Papillomavirus
YGTTLEQQY

SEQ ID NO: 32074 - protein, 11 aa, Artificial Sequence
  Peptide Derived from Human Papillomavirus
YGTTLEQQYNK

SEQ ID NO: 32075 - protein, 8 aa, Artificial Sequence
  Peptide Derived from Human Papillomavirus
YSKISEYR

SEQ ID NO: 32076 - protein, 9 aa, Artificial Sequence
  Peptide Derived from Human Papillomavirus
YSKISEYRH

SEQ ID NO: 32077 - protein, 10 aa, Artificial Sequence
  Peptide Derived from Human Papillomavirus
YSKISEYRHY

SEQ ID NO: 32078 - protein, 8 aa, Artificial Sequence
  Peptide Derived from Human Papillomavirus
AGQAEPDR

SEQ ID NO: 32079 - protein, 9 aa, Artificial Sequence
  Peptide Derived from Human Papillomavirus
AGQAEPDRA

SEQ ID NO: 32080 - protein, 10 aa, Artificial Sequence
  Peptide Derived from Human Papillomavirus
AGQAEPDRAH

SEQ ID NO: 32081 - protein, 11 aa, Artificial Sequence
  Peptide Derived from Human Papillomavirus
AGQAEPDRAHY

SEQ ID NO: 32082 - protein, 9 aa, Artificial Sequence
  Peptide Derived from Human Papillomavirus
CCKCDSTLR

SEQ ID NO: 32083 - protein, 10 aa, Artificial Sequence
  Peptide Derived from Human Papillomavirus
CVQSTHVDIR

SEQ ID NO: 32084 - protein, 11 aa, Artificial Sequence
  Peptide Derived from Human Papillomavirus
DGPAGQAEPDR

SEQ ID NO: 32085 - protein, 10 aa, Artificial Sequence
  Peptide Derived from Human Papillomavirus
DLQPETTDLY

SEQ ID NO: 32086 - protein, 8 aa, Artificial Sequence
  Peptide Derived from Human Papillomavirus
DTPTLHEY

SEQ ID NO: 32087 - protein, 8 aa, Artificial Sequence
  Peptide Derived from Human Papillomavirus
EDEIDGPA

SEQ ID NO: 32088 - protein, 11 aa, Artificial Sequence
  Peptide Derived from Human Papillomavirus
EDEIDGPAGQA

SEQ ID NO: 32089 - protein, 9 aa, Artificial Sequence
  Peptide Derived from Human Papillomavirus
EIDGPAGQA

SEQ ID NO: 32090 - protein, 8 aa, Artificial Sequence
  Peptide Derived from Human Papillomavirus
ETTDLYCY

SEQ ID NO: 32091 - protein, 10 aa, Artificial Sequence
  Peptide Derived from Human Papillomavirus
FCCKCDSTLR

SEQ ID NO: 32092 - protein, 9 aa, Artificial Sequence
  Peptide Derived from Human Papillomavirus
GDTPTLHEY

SEQ ID NO: 32093 - protein, 10 aa, Artificial Sequence
  Peptide Derived from Human Papillomavirus
GIVCPICSQK

SEQ ID NO: 32094 - protein, 8 aa, Artificial Sequence
  Peptide Derived from Human Papillomavirus
HGDTPTLH

SEQ ID NO: 32095 - protein, 10 aa, Artificial Sequence
  Peptide Derived from Human Papillomavirus
HGDTPTLHEY

SEQ ID NO: 32096 - protein, 8 aa, Artificial Sequence
  Peptide Derived from Human Papillomavirus
IDGPAGQA

SEQ ID NO: 32097 - protein, 9 aa, Artificial Sequence
  Peptide Derived from Human Papillomavirus
IVCPICSQK

SEQ ID NO: 32098 - protein, 11 aa, Artificial Sequence
  Peptide Derived from Human Papillomavirus
LCVQSTHVDIR

SEQ ID NO: 32099 - protein, 11 aa, Artificial Sequence
  Peptide Derived from Human Papillomavirus
LDLQPETTDLY

SEQ ID NO: 32100 - protein, 11 aa, Artificial Sequence
  Peptide Derived from Human Papillomavirus
LGIVCPICSQK

SEQ ID NO: 32101 - protein, 8 aa, Artificial Sequence
  Peptide Derived from Human Papillomavirus
NIVTFCCK

SEQ ID NO: 32102 - protein, 9 aa, Artificial Sequence
  Peptide Derived from Human Papillomavirus
PAGQAEPDR

SEQ ID NO: 32103 - protein, 10 aa, Artificial Sequence
  Peptide Derived from Human Papillomavirus
PAGQAEPDRA

SEQ ID NO: 32104 - protein, 11 aa, Artificial Sequence
  Peptide Derived from Human Papillomavirus
PAGQAEPDRAH

SEQ ID NO: 32105 - protein, 11 aa, Artificial Sequence
  Peptide Derived from Human Papillomavirus
PDRAHYNIVTF

SEQ ID NO: 32106 - protein, 8 aa, Artificial Sequence
  Peptide Derived from Human Papillomavirus
QAEPDRAH

SEQ ID NO: 32107 - protein, 9 aa, Artificial Sequence
  Peptide Derived from Human Papillomavirus
QAEPDRAHY

SEQ ID NO: 32108 - protein, 8 aa, Artificial Sequence
  Peptide Derived from Human Papillomavirus
QSTHVDIR

SEQ ID NO: 32109 - protein, 9 aa, Artificial Sequence
  Peptide Derived from Human Papillomavirus
RAHYNIVTF

SEQ ID NO: 32110 - protein, 8 aa, Artificial Sequence
  Peptide Derived from Human Papillomavirus
RLCVQSTH

SEQ ID NO: 32111 - protein, 11 aa, Artificial Sequence
  Peptide Derived from Human Papillomavirus
STLRLCVQSTH

SEQ ID NO: 32112 - protein, 11 aa, Artificial Sequence
  Peptide Derived from Human Papillomavirus
TFCCKCDSTLR

SEQ ID NO: 32113 - protein, 10 aa, Artificial Sequence
  Peptide Derived from Human Papillomavirus
TLRLCVQSTH

SEQ ID NO: 32114 - protein, 8 aa, Artificial Sequence
  Peptide Derived from Human Papillomavirus
VCPICSQK

SEQ ID NO: 32115 - protein, 10 aa, Artificial Sequence
  Peptide Derived from Human Papillomavirus
AAISTSETTY

SEQ ID NO: 32116 - protein, 11 aa, Artificial Sequence
  Peptide Derived from Human Papillomavirus
AAISTSETTYK

SEQ ID NO: 32117 - protein, 9 aa, Artificial Sequence
  Peptide Derived from Human Papillomavirus
AANAGVDNR

SEQ ID NO: 32118 - protein, 9 aa, Artificial Sequence
  Peptide Derived from Human Papillomavirus
ACQKHTPPA

SEQ ID NO: 32119 - protein, 11 aa, Artificial Sequence
  Peptide Derived from Human Papillomavirus
ACQKHTPPAPK

SEQ ID NO: 32120 - protein, 9 aa, Artificial Sequence
  Peptide Derived from Human Papillomavirus
ACVGVEVGR

SEQ ID NO: 32121 - protein, 10 aa, Artificial Sequence
  Peptide Derived from Human Papillomavirus
ADLDQFPLGR

SEQ ID NO: 32122 - protein, 11 aa, Artificial Sequence
  Peptide Derived from Human Papillomavirus
ADLDQFPLGRK

SEQ ID NO: 32123 - protein, 8 aa, Artificial Sequence
  Peptide Derived from Human Papillomavirus
ADVMTYIH

SEQ ID NO: 32124 - protein, 8 aa, Artificial Sequence
  Peptide Derived from Human Papillomavirus
AGLKAKPK

SEQ ID NO: 32125 - protein, 9 aa, Artificial Sequence
  Peptide Derived from Human Papillomavirus
AGLKAKPKF

SEQ ID NO: 32126 - protein, 8 aa, Artificial Sequence
  Peptide Derived from Human Papillomavirus
AGTSRLLA

SEQ ID NO: 32127 - protein, 11 aa, Artificial Sequence
  Peptide Derived from Human Papillomavirus
AGTSRLLAVGH

SEQ ID NO: 32128 - protein, 11 aa, Artificial Sequence
  Peptide Derived from Human Papillomavirus
AIACQKHTPPA

SEQ ID NO: 32129 - protein, 9 aa, Artificial Sequence
  Peptide Derived from Human Papillomavirus
AISTSETTY

SEQ ID NO: 32130 - protein, 10 aa, Artificial Sequence
  Peptide Derived from Human Papillomavirus
AISTSETTYK

SEQ ID NO: 32131 - protein, 9 aa, Artificial Sequence
  Peptide Derived from Human Papillomavirus
AMDFTTLQA

SEQ ID NO: 32132 - protein, 11 aa, Artificial Sequence
  Peptide Derived from Human Papillomavirus
AMDFTTLQANK

SEQ ID NO: 32133 - protein, 8 aa, Artificial Sequence
  Peptide Derived from Human Papillomavirus
ASAYAANA

SEQ ID NO: 32134 - protein, 11 aa, Artificial Sequence
  Peptide Derived from Human Papillomavirus
AVGENVPDDLY

SEQ ID NO: 32135 - protein, 10 aa, Artificial Sequence
  Peptide Derived from Human Papillomavirus
AVGHPYFPIK

SEQ ID NO: 32136 - protein, 11 aa, Artificial Sequence
  Peptide Derived from Human Papillomavirus
AVGHPYFPIKK

SEQ ID NO: 32137 - protein, 11 aa, Artificial Sequence
  Peptide Derived from Human Papillomavirus
CAAISTSETTY

SEQ ID NO: 32138 - protein, 10 aa, Artificial Sequence
  Peptide Derived from Human Papillomavirus
CTSICKYPDY

SEQ ID NO: 32139 - protein, 8 aa, Artificial Sequence
  Peptide Derived from Human Papillomavirus
CVGVEVGR

SEQ ID NO: 32140 - protein, 9 aa, Artificial Sequence
  Peptide Derived from Human Papillomavirus
DAQIFNKPY

SEQ ID NO: 32141 - protein, 8 aa, Artificial Sequence
  Peptide Derived from Human Papillomavirus
DDTENASA

SEQ ID NO: 32142 - protein, 9 aa, Artificial Sequence
  Peptide Derived from Human Papillomavirus
DDTENASAY

SEQ ID NO: 32143 - protein, 10 aa, Artificial Sequence
  Peptide Derived from Human Papillomavirus
DDTENASAYA

SEQ ID NO: 32144 - protein, 11 aa, Artificial Sequence
  Peptide Derived from Human Papillomavirus
DDTENASAYAA

SEQ ID NO: 32145 - protein, 9 aa, Artificial Sequence
  Peptide Derived from Human Papillomavirus
DFTTLQANK

SEQ ID NO: 32146 - protein, 9 aa, Artificial Sequence
  Peptide Derived from Human Papillomavirus
DGDMVDTGF

SEQ ID NO: 32147 - protein, 11 aa, Artificial Sequence
  Peptide Derived from Human Papillomavirus
DGDMVDTGFGA

SEQ ID NO: 32148 - protein, 8 aa, Artificial Sequence
  Peptide Derived from Human Papillomavirus
DICTSICK

SEQ ID NO: 32149 - protein, 9 aa, Artificial Sequence
  Peptide Derived from Human Papillomavirus
DICTSICKY

SEQ ID NO: 32150 - protein, 9 aa, Artificial Sequence
  Peptide Derived from Human Papillomavirus
DLDQFPLGR

SEQ ID NO: 32151 - protein, 10 aa, Artificial Sequence
  Peptide Derived from Human Papillomavirus
DLDQFPLGRK

SEQ ID NO: 32152 - protein, 11 aa, Artificial Sequence
  Peptide Derived from Human Papillomavirus
DLDQFPLGRKF

SEQ ID NO: 32153 - protein, 10 aa, Artificial Sequence
  Peptide Derived from Human Papillomavirus
DLQFIFQLCK

SEQ ID NO: 32154 - protein, 11 aa, Artificial Sequence
  Peptide Derived from Human Papillomavirus
DLYIKGSGSTA

SEQ ID NO: 32155 - protein, 9 aa, Artificial Sequence
  Peptide Derived from Human Papillomavirus
DMVDTGFGA

SEQ ID NO: 32156 - protein, 8 aa, Artificial Sequence
  Peptide Derived from Human Papillomavirus
DSLFFYLR

SEQ ID NO: 32157 - protein, 9 aa, Artificial Sequence
  Peptide Derived from Human Papillomavirus
DSLFFYLRR

SEQ ID NO: 32158 - protein, 8 aa, Artificial Sequence
  Peptide Derived from Human Papillomavirus
DTENASAY

SEQ ID NO: 32159 - protein, 9 aa, Artificial Sequence
  Peptide Derived from Human Papillomavirus
DTENASAYA

SEQ ID NO: 32160 - protein, 10 aa, Artificial Sequence
  Peptide Derived from Human Papillomavirus
DTENASAYAA

SEQ ID NO: 32161 - protein, 9 aa, Artificial Sequence
  Peptide Derived from Human Papillomavirus
DTGFGAMDF

SEQ ID NO: 32162 - protein, 8 aa, Artificial Sequence
  Peptide Derived from Human Papillomavirus
DTQRLVWA

SEQ ID NO: 32163 - protein, 11 aa, Artificial Sequence
  Peptide Derived from Human Papillomavirus
DTSFYNPDTQR

SEQ ID NO: 32164 - protein, 10 aa, Artificial Sequence
  Peptide Derived from Human Papillomavirus
DTYRFVTSQA

SEQ ID NO: 32165 - protein, 8 aa, Artificial Sequence
  Peptide Derived from Human Papillomavirus
DVNVYHIF

SEQ ID NO: 32166 - protein, 9 aa, Artificial Sequence
  Peptide Derived from Human Papillomavirus
DVNVYHIFF

SEQ ID NO: 32167 - protein, 8 aa, Artificial Sequence
  Peptide Derived from Human Papillomavirus
ECISMDYK

SEQ ID NO: 32168 - protein, 9 aa, Artificial Sequence
  Peptide Derived from Human Papillomavirus
EDPLKKYTF

SEQ ID NO: 32169 - protein, 11 aa, Artificial Sequence
  Peptide Derived from Human Papillomavirus
EDTYRFVTSQA

SEQ ID NO: 32170 - protein, 9 aa, Artificial Sequence
  Peptide Derived from Human Papillomavirus
ETTYKNTNF

SEQ ID NO: 32171 - protein, 10 aa, Artificial Sequence
  Peptide Derived from Human Papillomavirus
ETTYKNTNFK

SEQ ID NO: 32172 - protein, 8 aa, Artificial Sequence
  Peptide Derived from Human Papillomavirus
EVNLKEKF

SEQ ID NO: 32173 - protein, 10 aa, Artificial Sequence
  Peptide Derived from Human Papillomavirus
EVNLKEKFSA

SEQ ID NO: 32174 - protein, 10 aa, Artificial Sequence
  Peptide Derived from Human Papillomavirus
FFYLRREQMF

SEQ ID NO: 32175 - protein, 11 aa, Artificial Sequence
  Peptide Derived from Human Papillomavirus
FGAMDFTTLQA

SEQ ID NO: 32176 - protein, 8 aa, Artificial Sequence
  Peptide Derived from Human Papillomavirus
FGFPDTSF

SEQ ID NO: 32177 - protein, 9 aa, Artificial Sequence
  Peptide Derived from Human Papillomavirus
FGFPDTSFY

SEQ ID NO: 32178 - protein, 10 aa, Artificial Sequence
  Peptide Derived from Human Papillomavirus
FIYILVITCY

SEQ ID NO: 32179 - protein, 8 aa, Artificial Sequence
  Peptide Derived from Human Papillomavirus
FLLQAGLK

SEQ ID NO: 32180 - protein, 9 aa, Artificial Sequence
  Peptide Derived from Human Papillomavirus
FLLQAGLKA

SEQ ID NO: 32181 - protein, 10 aa, Artificial Sequence
  Peptide Derived from Human Papillomavirus
FLLQAGLKAK

SEQ ID NO: 32182 - protein, 8 aa, Artificial Sequence
  Peptide Derived from Human Papillomavirus
FSADLDQF

SEQ ID NO: 32183 - protein, 8 aa, Artificial Sequence
  Peptide Derived from Human Papillomavirus
FTLGKRKA

SEQ ID NO: 32184 - protein, 8 aa, Artificial Sequence
  Peptide Derived from Human Papillomavirus
FTTLQANK

SEQ ID NO: 32185 - protein, 8 aa, Artificial Sequence
  Peptide Derived from Human Papillomavirus
FVRHLFNR

SEQ ID NO: 32186 - protein, 9 aa, Artificial Sequence
  Peptide Derived from Human Papillomavirus
FVRHLFNRA

SEQ ID NO: 32187 - protein, 11 aa, Artificial Sequence
  Peptide Derived from Human Papillomavirus
FVRHLFNRAGA

SEQ ID NO: 32188 - protein, 8 aa, Artificial Sequence
  Peptide Derived from Human Papillomavirus
FVTSQAIA

SEQ ID NO: 32189 - protein, 11 aa, Artificial Sequence
  Peptide Derived from Human Papillomavirus
FVTSQAIACQK

SEQ ID NO: 32190 - protein, 9 aa, Artificial Sequence
  Peptide Derived from Human Papillomavirus
FVTVVDTTR

SEQ ID NO: 32191 - protein, 10 aa, Artificial Sequence
  Peptide Derived from Human Papillomavirus
GAMDFTTLQA

SEQ ID NO: 32192 - protein, 9 aa, Artificial Sequence
  Peptide Derived from Human Papillomavirus
GCKPPIGEH

SEQ ID NO: 32193 - protein, 8 aa, Artificial Sequence
  Peptide Derived from Human Papillomavirus
GDMVDTGF

SEQ ID NO: 32194 - protein, 10 aa, Artificial Sequence
  Peptide Derived from Human Papillomavirus
GDMVDTGFGA

SEQ ID NO: 32195 - protein, 9 aa, Artificial Sequence
  Peptide Derived from Human Papillomavirus
GDSLFFYLR

SEQ ID NO: 32196 - protein, 10 aa, Artificial Sequence
  Peptide Derived from Human Papillomavirus
GDSLFFYLRR

SEQ ID NO: 32197 - protein, 8 aa, Artificial Sequence
  Peptide Derived from Human Papillomavirus
GFPDTSFY

SEQ ID NO: 32198 - protein, 8 aa, Artificial Sequence
  Peptide Derived from Human Papillomavirus
GGTLEDTY

SEQ ID NO: 32199 - protein, 9 aa, Artificial Sequence
  Peptide Derived from Human Papillomavirus
GGTLEDTYR

SEQ ID NO: 32200 - protein, 10 aa, Artificial Sequence
  Peptide Derived from Human Papillomavirus
GGTLEDTYRF

SEQ ID NO: 32201 - protein, 9 aa, Artificial Sequence
  Peptide Derived from Human Papillomavirus
GICWGNQLF

SEQ ID NO: 32202 - protein, 10 aa, Artificial Sequence
  Peptide Derived from Human Papillomavirus
GISGHPLLNK

SEQ ID NO: 32203 - protein, 8 aa, Artificial Sequence
  Peptide Derived from Human Papillomavirus
GLKAKPKF

SEQ ID NO: 32204 - protein, 8 aa, Artificial Sequence
  Peptide Derived from Human Papillomavirus
GLQYRVFR

SEQ ID NO: 32205 - protein, 10 aa, Artificial Sequence
  Peptide Derived from Human Papillomavirus
GLQYRVFRIH

SEQ ID NO: 32206 - protein, 9 aa, Artificial Sequence
  Peptide Derived from Human Papillomavirus
GSGSTANLA

SEQ ID NO: 32207 - protein, 8 aa, Artificial Sequence
  Peptide Derived from Human Papillomavirus
GSMVTSDA

SEQ ID NO: 32208 - protein, 11 aa, Artificial Sequence
  Peptide Derived from Human Papillomavirus
GSMVTSDAQIF

SEQ ID NO: 32209 - protein, 8 aa, Artificial Sequence
  Peptide Derived from Human Papillomavirus
GSPCTNVA

SEQ ID NO: 32210 - protein, 11 aa, Artificial Sequence
  Peptide Derived from Human Papillomavirus
GSTANLASSNY

SEQ ID NO: 32211 - protein, 8 aa, Artificial Sequence
  Peptide Derived from Human Papillomavirus
GTLEDTYR

SEQ ID NO: 32212 - protein, 9 aa, Artificial Sequence
  Peptide Derived from Human Papillomavirus
GTLEDTYRF

SEQ ID NO: 32213 - protein, 10 aa, Artificial Sequence
  Peptide Derived from Human Papillomavirus
GTSRLLAVGH

SEQ ID NO: 32214 - protein, 9 aa, Artificial Sequence
  Peptide Derived from Human Papillomavirus
HAGTSRLLA

SEQ ID NO: 32215 - protein, 9 aa, Artificial Sequence
  Peptide Derived from Human Papillomavirus
HGEEYDLQF

SEQ ID NO: 32216 - protein, 11 aa, Artificial Sequence
  Peptide Derived from Human Papillomavirus
HGEEYDLQFIF

SEQ ID NO: 32217 - protein, 8 aa, Artificial Sequence
  Peptide Derived from Human Papillomavirus
HLFNRAGA

SEQ ID NO: 32218 - protein, 8 aa, Artificial Sequence
  Peptide Derived from Human Papillomavirus
HLPDPNKF

SEQ ID NO: 32219 - protein, 10 aa, Artificial Sequence
  Peptide Derived from Human Papillomavirus
HLPDPNKFGF

SEQ ID NO: 32220 - protein, 10 aa, Artificial Sequence
  Peptide Derived from Human Papillomavirus
IACQKHTPPA

SEQ ID NO: 32221 - protein, 9 aa, Artificial Sequence
  Peptide Derived from Human Papillomavirus
ICKYPDYIK

SEQ ID NO: 32222 - protein, 8 aa, Artificial Sequence
  Peptide Derived from Human Papillomavirus
ICTSICKY

SEQ ID NO: 32223 - protein, 11 aa, Artificial Sequence
  Peptide Derived from Human Papillomavirus
ICTSICKYPDY

SEQ ID NO: 32224 - protein, 8 aa, Artificial Sequence
  Peptide Derived from Human Papillomavirus
ICWGNQLF

SEQ ID NO: 32225 - protein, 10 aa, Artificial Sequence
  Peptide Derived from Human Papillomavirus
IFNKPYWLQR

SEQ ID NO: 32226 - protein, 11 aa, Artificial Sequence
  Peptide Derived from Human Papillomavirus
IFNKPYWLQRA

SEQ ID NO: 32227 - protein, 11 aa, Artificial Sequence
  Peptide Derived from Human Papillomavirus
IFQLCKITLTA

SEQ ID NO: 32228 - protein, 10 aa, Artificial Sequence
  Peptide Derived from Human Papillomavirus
IGCKPPIGEH

SEQ ID NO: 32229 - protein, 11 aa, Artificial Sequence
  Peptide Derived from Human Papillomavirus
ILVPKVSGLQY

SEQ ID NO: 32230 - protein, 9 aa, Artificial Sequence
  Peptide Derived from Human Papillomavirus
ISGHPLLNK

SEQ ID NO: 32231 - protein, 8 aa, Artificial Sequence
  Peptide Derived from Human Papillomavirus
ISTSETTY

SEQ ID NO: 32232 - protein, 9 aa, Artificial Sequence
  Peptide Derived from Human Papillomavirus
ISTSETTYK

SEQ ID NO: 32233 - protein, 11 aa, Artificial Sequence
  Peptide Derived from Human Papillomavirus
ITCYENDVNVY

SEQ ID NO: 32234 - protein, 10 aa, Artificial Sequence
  Peptide Derived from Human Papillomavirus
ITLTADVMTY

SEQ ID NO: 32235 - protein, 10 aa, Artificial Sequence
  Peptide Derived from Human Papillomavirus
KAKPKFTLGK

SEQ ID NO: 32236 - protein, 11 aa, Artificial Sequence
  Peptide Derived from Human Papillomavirus
KAKPKFTLGKR

SEQ ID NO: 32237 - protein, 9 aa, Artificial Sequence
  Peptide Derived from Human Papillomavirus
KFGFPDTSF

SEQ ID NO: 32238 - protein, 10 aa, Artificial Sequence
  Peptide Derived from Human Papillomavirus
KFGFPDTSFY

SEQ ID NO: 32239 - protein, 9 aa, Artificial Sequence
  Peptide Derived from Human Papillomavirus
KFLLQAGLK

SEQ ID NO: 32240 - protein, 10 aa, Artificial Sequence
  Peptide Derived from Human Papillomavirus
KFLLQAGLKA

SEQ ID NO: 32241 - protein, 11 aa, Artificial Sequence
  Peptide Derived from Human Papillomavirus
KFLLQAGLKAK

SEQ ID NO: 32242 - protein, 9 aa, Artificial Sequence
  Peptide Derived from Human Papillomavirus
KFSADLDQF

SEQ ID NO: 32243 - protein, 8 aa, Artificial Sequence
  Peptide Derived from Human Papillomavirus
KFTLGKRK

SEQ ID NO: 32244 - protein, 9 aa, Artificial Sequence
  Peptide Derived from Human Papillomavirus
KFTLGKRKA

SEQ ID NO: 32245 - protein, 10 aa, Artificial Sequence
  Peptide Derived from Human Papillomavirus
KGSGSTANLA

SEQ ID NO: 32246 - protein, 9 aa, Artificial Sequence
  Peptide Derived from Human Papillomavirus
KGSPCTNVA

SEQ ID NO: 32247 - protein, 11 aa, Artificial Sequence
  Peptide Derived from Human Papillomavirus
KITLTADVMTY

SEQ ID NO: 32248 - protein, 8 aa, Artificial Sequence
  Peptide Derived from Human Papillomavirus
KLDDTENA

SEQ ID NO: 32249 - protein, 10 aa, Artificial Sequence
  Peptide Derived from Human Papillomavirus
KLDDTENASA

SEQ ID NO: 32250 - protein, 11 aa, Artificial Sequence
  Peptide Derived from Human Papillomavirus
KLDDTENASAY

SEQ ID NO: 32251 - protein, 8 aa, Artificial Sequence
  Peptide Derived from Human Papillomavirus
KVSGLQYR

SEQ ID NO: 32252 - protein, 10 aa, Artificial Sequence
  Peptide Derived from Human Papillomavirus
KVSGLQYRVF

SEQ ID NO: 32253 - protein, 11 aa, Artificial Sequence
  Peptide Derived from Human Papillomavirus
KVSGLQYRVFR

SEQ ID NO: 32254 - protein, 8 aa, Artificial Sequence
  Peptide Derived from Human Papillomavirus
KVVSTDEY

SEQ ID NO: 32255 - protein, 10 aa, Artificial Sequence
  Peptide Derived from Human Papillomavirus
KVVSTDEYVA

SEQ ID NO: 32256 - protein, 11 aa, Artificial Sequence
  Peptide Derived from Human Papillomavirus
KVVSTDEYVAR

SEQ ID NO: 32257 - protein, 8 aa, Artificial Sequence
  Peptide Derived from Human Papillomavirus
LAVGHPYF

SEQ ID NO: 32258 - protein, 11 aa, Artificial Sequence
  Peptide Derived from Human Papillomavirus
LAVGHPYFPIK

SEQ ID NO: 32259 - protein, 8 aa, Artificial Sequence
  Peptide Derived from Human Papillomavirus
LCKITLTA

SEQ ID NO: 32260 - protein, 9 aa, Artificial Sequence
  Peptide Derived from Human Papillomavirus
LDDTENASA

SEQ ID NO: 32261 - protein, 10 aa, Artificial Sequence
  Peptide Derived from Human Papillomavirus
LDDTENASAY

SEQ ID NO: 32262 - protein, 11 aa, Artificial Sequence
  Peptide Derived from Human Papillomavirus
LDDTENASAYA

SEQ ID NO: 32263 - protein, 9 aa, Artificial Sequence
  Peptide Derived from Human Papillomavirus
LDICTSICK

SEQ ID NO: 32264 - protein, 10 aa, Artificial Sequence
  Peptide Derived from Human Papillomavirus
LDICTSICKY

SEQ ID NO: 32265 - protein, 8 aa, Artificial Sequence
  Peptide Derived from Human Papillomavirus
LDQFPLGR

SEQ ID NO: 32266 - protein, 9 aa, Artificial Sequence
  Peptide Derived from Human Papillomavirus
LDQFPLGRK

SEQ ID NO: 32267 - protein, 10 aa, Artificial Sequence
  Peptide Derived from Human Papillomavirus
LDQFPLGRKF

SEQ ID NO: 32268 - protein, 11 aa, Artificial Sequence
  Peptide Derived from Human Papillomavirus
LFFYLRREQMF

SEQ ID NO: 32269 - protein, 10 aa, Artificial Sequence
  Peptide Derived from Human Papillomavirus
LFVTVVDTTR

SEQ ID NO: 32270 - protein, 9 aa, Artificial Sequence
  Peptide Derived from Human Papillomavirus
LGRKFLLQA

SEQ ID NO: 32271 - protein, 8 aa, Artificial Sequence
  Peptide Derived from Human Papillomavirus
LGVGISGH

SEQ ID NO: 32272 - protein, 11 aa, Artificial Sequence
  Peptide Derived from Human Papillomavirus
LIGCKPPIGEH

SEQ ID NO: 32273 - protein, 8 aa, Artificial Sequence
  Peptide Derived from Human Papillomavirus
LLAVGHPY

SEQ ID NO: 32274 - protein, 9 aa, Artificial Sequence
  Peptide Derived from Human Papillomavirus
LLAVGHPYF

SEQ ID NO: 32275 - protein, 11 aa, Artificial Sequence
  Peptide Derived from Human Papillomavirus
LLNKLDDTENA

SEQ ID NO: 32276 - protein, 8 aa, Artificial Sequence
  Peptide Derived from Human Papillomavirus
LLQAGLKA

SEQ ID NO: 32277 - protein, 9 aa, Artificial Sequence
  Peptide Derived from Human Papillomavirus
LLQAGLKAK

SEQ ID NO: 32278 - protein, 11 aa, Artificial Sequence
  Peptide Derived from Human Papillomavirus
LLQAGLKAKPK

SEQ ID NO: 32279 - protein, 8 aa, Artificial Sequence
  Peptide Derived from Human Papillomavirus
LTADVMTY

SEQ ID NO: 32280 - protein, 10 aa, Artificial Sequence
  Peptide Derived from Human Papillomavirus
LTADVMTYIH

SEQ ID NO: 32281 - protein, 10 aa, Artificial Sequence
  Peptide Derived from Human Papillomavirus
LVPKVSGLQY

SEQ ID NO: 32282 - protein, 11 aa, Artificial Sequence
  Peptide Derived from Human Papillomavirus
LVPKVSGLQYR

SEQ ID NO: 32283 - protein, 8 aa, Artificial Sequence
  Peptide Derived from Human Papillomavirus
MDFTTLQA

SEQ ID NO: 32284 - protein, 10 aa, Artificial Sequence
  Peptide Derived from Human Papillomavirus
MDFTTLQANK

SEQ ID NO: 32285 - protein, 9 aa, Artificial Sequence
  Peptide Derived from Human Papillomavirus
MFVRHLFNR

SEQ ID NO: 32286 - protein, 10 aa, Artificial Sequence
  Peptide Derived from Human Papillomavirus
MFVRHLFNRA

SEQ ID NO: 32287 - protein, 9 aa, Artificial Sequence
  Peptide Derived from Human Papillomavirus
MSLWLPSEA

SEQ ID NO: 32288 - protein, 8 aa, Artificial Sequence
  Peptide Derived from Human Papillomavirus
MVDTGFGA

SEQ ID NO: 32289 - protein, 11 aa, Artificial Sequence
  Peptide Derived from Human Papillomavirus
MVDTGFGAMDF

SEQ ID NO: 32290 - protein, 11 aa, Artificial Sequence
  Peptide Derived from Human Papillomavirus
MVSEPYGDSLF

SEQ ID NO: 32291 - protein, 9 aa, Artificial Sequence
  Peptide Derived from Human Papillomavirus
MVTSDAQIF

SEQ ID NO: 32292 - protein, 11 aa, Artificial Sequence
  Peptide Derived from Human Papillomavirus
MVTSDAQIFNK

SEQ ID NO: 32293 - protein, 9 aa, Artificial Sequence
  Peptide Derived from Human Papillomavirus
NASAYAANA

SEQ ID NO: 32294 - protein, 9 aa, Artificial Sequence
  Peptide Derived from Human Papillomavirus
NDVNVYHIF

SEQ ID NO: 32295 - protein, 10 aa, Artificial Sequence
  Peptide Derived from Human Papillomavirus
NDVNVYHIFF

SEQ ID NO: 32296 - protein, 8 aa, Artificial Sequence
  Peptide Derived from Human Papillomavirus
NFKEYLRH

SEQ ID NO: 32297 - protein, 10 aa, Artificial Sequence
  Peptide Derived from Human Papillomavirus
NGICWGNQLF

SEQ ID NO: 32298 - protein, 10 aa, Artificial Sequence
  Peptide Derived from Human Papillomavirus
NIYYHAGTSR

SEQ ID NO: 32299 - protein, 8 aa, Artificial Sequence
  Peptide Derived from Human Papillomavirus
NLASSNYF

SEQ ID NO: 32300 - protein, 8 aa, Artificial Sequence
  Peptide Derived from Human Papillomavirus
NLKEKFSA

SEQ ID NO: 32301 - protein, 10 aa, Artificial Sequence
  Peptide Derived from Human Papillomavirus
NSTILEDWNF

SEQ ID NO: 32302 - protein, 9 aa, Artificial Sequence
  Peptide Derived from Human Papillomavirus
NTNFKEYLR

SEQ ID NO: 32303 - protein, 10 aa, Artificial Sequence
  Peptide Derived from Human Papillomavirus
NTNFKEYLRH

SEQ ID NO: 32304 - protein, 9 aa, Artificial Sequence
  Peptide Derived from Human Papillomavirus
NVPDDLYIK

SEQ ID NO: 32305 - protein, 9 aa, Artificial Sequence
  Peptide Derived from Human Papillomavirus
PAPKEDPLK

SEQ ID NO: 32306 - protein, 10 aa, Artificial Sequence
  Peptide Derived from Human Papillomavirus
PAPKEDPLKK

SEQ ID NO: 32307 - protein, 11 aa, Artificial Sequence
  Peptide Derived from Human Papillomavirus
PAPKEDPLKKY

SEQ ID NO: 32308 - protein, 8 aa, Artificial Sequence
  Peptide Derived from Human Papillomavirus
PDPNKFGF

SEQ ID NO: 32309 - protein, 9 aa, Artificial Sequence
  Peptide Derived from Human Papillomavirus
PDTQRLVWA

SEQ ID NO: 32310 - protein, 11 aa, Artificial Sequence
  Peptide Derived from Human Papillomavirus
PDYIKMVSEPY

SEQ ID NO: 32311 - protein, 9 aa, Artificial Sequence
  Peptide Derived from Human Papillomavirus
PGGTLEDTY

SEQ ID NO: 32312 - protein, 10 aa, Artificial Sequence
  Peptide Derived from Human Papillomavirus
PGGTLEDTYR

SEQ ID NO: 32313 - protein, 11 aa, Artificial Sequence
  Peptide Derived from Human Papillomavirus
PGGTLEDTYRF

SEQ ID NO: 32314 - protein, 8 aa, Artificial Sequence
  Peptide Derived from Human Papillomavirus
PIGEHWGK

SEQ ID NO: 32315 - protein, 9 aa, Artificial Sequence
  Peptide Derived from Human Papillomavirus
PIKKPNNNK

SEQ ID NO: 32316 - protein, 10 aa, Artificial Sequence
  Peptide Derived from Human Papillomavirus
PLDICTSICK

SEQ ID NO: 32317 - protein, 11 aa, Artificial Sequence
  Peptide Derived from Human Papillomavirus
PLDICTSICKY

SEQ ID NO: 32318 - protein, 10 aa, Artificial Sequence
  Peptide Derived from Human Papillomavirus
PLGRKFLLQA

SEQ ID NO: 32319 - protein, 9 aa, Artificial Sequence
  Peptide Derived from Human Papillomavirus
PLGVGISGH

SEQ ID NO: 32320 - protein, 10 aa, Artificial Sequence
  Peptide Derived from Human Papillomavirus
PSGSMVTSDA

SEQ ID NO: 32321 - protein, 10 aa, Artificial Sequence
  Peptide Derived from Human Papillomavirus
PTTSSTSTTA

SEQ ID NO: 32322 - protein, 11 aa, Artificial Sequence
  Peptide Derived from Human Papillomavirus
PTTSSTSTTAK

SEQ ID NO: 32323 - protein, 11 aa, Artificial Sequence
  Peptide Derived from Human Papillomavirus
PVSKVVSTDEY

SEQ ID NO: 32324 - protein, 9 aa, Artificial Sequence
  Peptide Derived from Human Papillomavirus
QAGLKAKPK

SEQ ID NO: 32325 - protein, 10 aa, Artificial Sequence
  Peptide Derived from Human Papillomavirus
QAGLKAKPKF

SEQ ID NO: 32326 - protein, 8 aa, Artificial Sequence
  Peptide Derived from Human Papillomavirus
QAIACQKH

SEQ ID NO: 32327 - protein, 10 aa, Artificial Sequence
  Peptide Derived from Human Papillomavirus
QDGDMVDTGF

SEQ ID NO: 32328 - protein, 8 aa, Artificial Sequence
  Peptide Derived from Human Papillomavirus
QFIFQLCK

SEQ ID NO: 32329 - protein, 8 aa, Artificial Sequence
  Peptide Derived from Human Papillomavirus
QFPLGRKF

SEQ ID NO: 32330 - protein, 11 aa, Artificial Sequence
  Peptide Derived from Human Papillomavirus
QIFNKPYWLQR

SEQ ID NO: 32331 - protein, 9 aa, Artificial Sequence
  Peptide Derived from Human Papillomavirus
QLCKITLTA

SEQ ID NO: 32332 - protein, 8 aa, Artificial Sequence
  Peptide Derived from Human Papillomavirus
QLCLIGCK

SEQ ID NO: 32333 - protein, 11 aa, Artificial Sequence
  Peptide Derived from Human Papillomavirus
QLFVTVVDTTR

SEQ ID NO: 32334 - protein, 8 aa, Artificial Sequence
  Peptide Derived from Human Papillomavirus
QMFVRHLF

SEQ ID NO: 32335 - protein, 10 aa, Artificial Sequence
  Peptide Derived from Human Papillomavirus
QMFVRHLFNR

SEQ ID NO: 32336 - protein, 11 aa, Artificial Sequence
  Peptide Derived from Human Papillomavirus
QMFVRHLFNRA

SEQ ID NO: 32337 - protein, 10 aa, Artificial Sequence
  Peptide Derived from Human Papillomavirus
QMSLWLPSEA

SEQ ID NO: 32338 - protein, 10 aa, Artificial Sequence
  Peptide Derived from Human Papillomavirus
QTQLCLIGCK

SEQ ID NO: 32339 - protein, 9 aa, Artificial Sequence
  Peptide Derived from Human Papillomavirus
RFVTSQAIA

SEQ ID NO: 32340 - protein, 9 aa, Artificial Sequence
  Peptide Derived from Human Papillomavirus
RIHLPDPNK

SEQ ID NO: 32341 - protein, 10 aa, Artificial Sequence
  Peptide Derived from Human Papillomavirus
RIHLPDPNKF

SEQ ID NO: 32342 - protein, 9 aa, Artificial Sequence
  Peptide Derived from Human Papillomavirus
RLLAVGHPY

SEQ ID NO: 32343 - protein, 10 aa, Artificial Sequence
  Peptide Derived from Human Papillomavirus
RLLAVGHPYF

SEQ ID NO: 32344 - protein, 9 aa, Artificial Sequence
  Peptide Derived from Human Papillomavirus
RSTNMSLCA

SEQ ID NO: 32345 - protein, 10 aa, Artificial Sequence
  Peptide Derived from Human Papillomavirus
RSTNMSLCAA

SEQ ID NO: 32346 - protein, 8 aa, Artificial Sequence
  Peptide Derived from Human Papillomavirus
RTNIYYHA

SEQ ID NO: 32347 - protein, 11 aa, Artificial Sequence
  Peptide Derived from Human Papillomavirus
SADLDQFPLGR

SEQ ID NO: 32348 - protein, 8 aa, Artificial Sequence
  Peptide Derived from Human Papillomavirus
SDAQIFNK

SEQ ID NO: 32349 - protein, 10 aa, Artificial Sequence
  Peptide Derived from Human Papillomavirus
SDAQIFNKPY

SEQ ID NO: 32350 - protein, 9 aa, Artificial Sequence
  Peptide Derived from Human Papillomavirus
SFYNPDTQR

SEQ ID NO: 32351 - protein, 8 aa, Artificial Sequence
  Peptide Derived from Human Papillomavirus
SGHPLLNK

SEQ ID NO: 32352 - protein, 8 aa, Artificial Sequence
  Peptide Derived from Human Papillomavirus
SGLQYRVF

SEQ ID NO: 32353 - protein, 9 aa, Artificial Sequence
  Peptide Derived from Human Papillomavirus
SGLQYRVFR

SEQ ID NO: 32354 - protein, 11 aa, Artificial Sequence
  Peptide Derived from Human Papillomavirus
SGLQYRVFRIH

SEQ ID NO: 32355 - protein, 9 aa, Artificial Sequence
  Peptide Derived from Human Papillomavirus
SGSMVTSDA

SEQ ID NO: 32356 - protein, 8 aa, Artificial Sequence
  Peptide Derived from Human Papillomavirus
SGSTANLA

SEQ ID NO: 32357 - protein, 8 aa, Artificial Sequence
  Peptide Derived from Human Papillomavirus
SICKYPDY

SEQ ID NO: 32358 - protein, 10 aa, Artificial Sequence
  Peptide Derived from Human Papillomavirus
SICKYPDYIK

SEQ ID NO: 32359 - protein, 8 aa, Artificial Sequence
  Peptide Derived from Human Papillomavirus
SLFFYLRR

SEQ ID NO: 32360 - protein, 8 aa, Artificial Sequence
  Peptide Derived from Human Papillomavirus
SLWLPSEA

SEQ ID NO: 32361 - protein, 11 aa, Artificial Sequence
  Peptide Derived from Human Papillomavirus
SLWLPSEATVY

SEQ ID NO: 32362 - protein, 10 aa, Artificial Sequence
  Peptide Derived from Human Papillomavirus
SMVTSDAQIF

SEQ ID NO: 32363 - protein, 8 aa, Artificial Sequence
  Peptide Derived from Human Papillomavirus
SSTSTTAK

SEQ ID NO: 32364 - protein, 9 aa, Artificial Sequence
  Peptide Derived from Human Papillomavirus
SSTSTTAKR

SEQ ID NO: 32365 - protein, 10 aa, Artificial Sequence
  Peptide Derived from Human Papillomavirus
SSTSTTAKRK

SEQ ID NO: 32366 - protein, 11 aa, Artificial Sequence
  Peptide Derived from Human Papillomavirus
SSTSTTAKRKK

SEQ ID NO: 32367 - protein, 10 aa, Artificial Sequence
  Peptide Derived from Human Papillomavirus
STANLASSNY

SEQ ID NO: 32368 - protein, 11 aa, Artificial Sequence
  Peptide Derived from Human Papillomavirus
STANLASSNYF

SEQ ID NO: 32369 - protein, 8 aa, Artificial Sequence
  Peptide Derived from Human Papillomavirus
STDEYVAR

SEQ ID NO: 32370 - protein, 9 aa, Artificial Sequence
  Peptide Derived from Human Papillomavirus
STILEDWNF

SEQ ID NO: 32371 - protein, 8 aa, Artificial Sequence
  Peptide Derived from Human Papillomavirus
STNMSLCA

SEQ ID NO: 32372 - protein, 9 aa, Artificial Sequence
  Peptide Derived from Human Papillomavirus
STNMSLCAA

SEQ ID NO: 32373 - protein, 8 aa, Artificial Sequence
  Peptide Derived from Human Papillomavirus
STSETTYK

SEQ ID NO: 32374 - protein, 8 aa, Artificial Sequence
  Peptide Derived from Human Papillomavirus
STSTTAKR

SEQ ID NO: 32375 - protein, 9 aa, Artificial Sequence
  Peptide Derived from Human Papillomavirus
STSTTAKRK

SEQ ID NO: 32376 - protein, 10 aa, Artificial Sequence
  Peptide Derived from Human Papillomavirus
STSTTAKRKK

SEQ ID NO: 32377 - protein, 11 aa, Artificial Sequence
  Peptide Derived from Human Papillomavirus
STSTTAKRKKR

SEQ ID NO: 32378 - protein, 8 aa, Artificial Sequence
  Peptide Derived from Human Papillomavirus
STTAKRKK

SEQ ID NO: 32379 - protein, 9 aa, Artificial Sequence
  Peptide Derived from Human Papillomavirus
STTAKRKKR

SEQ ID NO: 32380 - protein, 10 aa, Artificial Sequence
  Peptide Derived from Human Papillomavirus
STTAKRKKRK

SEQ ID NO: 32381 - protein, 9 aa, Artificial Sequence
  Peptide Derived from Human Papillomavirus
TADVMTYIH

SEQ ID NO: 32382 - protein, 8 aa, Artificial Sequence
  Peptide Derived from Human Papillomavirus
TAKRKKRK

SEQ ID NO: 32383 - protein, 9 aa, Artificial Sequence
  Peptide Derived from Human Papillomavirus
TANLASSNY

SEQ ID NO: 32384 - protein, 10 aa, Artificial Sequence
  Peptide Derived from Human Papillomavirus
TANLASSNYF

SEQ ID NO: 32385 - protein, 10 aa, Artificial Sequence
  Peptide Derived from Human Papillomavirus
TCYENDVNVY

SEQ ID NO: 32386 - protein, 11 aa, Artificial Sequence
  Peptide Derived from Human Papillomavirus
TCYENDVNVYH

SEQ ID NO: 32387 - protein, 11 aa, Artificial Sequence
  Peptide Derived from Human Papillomavirus
TDEYVARTNIY

SEQ ID NO: 32388 - protein, 11 aa, Artificial Sequence
  Peptide Derived from Human Papillomavirus
TFIYILVITCY

SEQ ID NO: 32389 - protein, 8 aa, Artificial Sequence
  Peptide Derived from Human Papillomavirus
TFWEVNLK

SEQ ID NO: 32390 - protein, 10 aa, Artificial Sequence
  Peptide Derived from Human Papillomavirus
TFWEVNLKEK

SEQ ID NO: 32391 - protein, 11 aa, Artificial Sequence
  Peptide Derived from Human Papillomavirus
TFWEVNLKEKF

SEQ ID NO: 32392 - protein, 8 aa, Artificial Sequence
  Peptide Derived from Human Papillomavirus
TGFGAMDF

SEQ ID NO: 32393 - protein, 8 aa, Artificial Sequence
  Peptide Derived from Human Papillomavirus
TILEDWNF

SEQ ID NO: 32394 - protein, 8 aa, Artificial Sequence
  Peptide Derived from Human Papillomavirus
TLEDTYRF

SEQ ID NO: 32395 - protein, 9 aa, Artificial Sequence
  Peptide Derived from Human Papillomavirus
TLTADVMTY

SEQ ID NO: 32396 - protein, 11 aa, Artificial Sequence
  Peptide Derived from Human Papillomavirus
TLTADVMTYIH

SEQ ID NO: 32397 - protein, 9 aa, Artificial Sequence
  Peptide Derived from Human Papillomavirus
TSDAQIFNK

SEQ ID NO: 32398 - protein, 11 aa, Artificial Sequence
  Peptide Derived from Human Papillomavirus
TSDAQIFNKPY

SEQ ID NO: 32399 - protein, 11 aa, Artificial Sequence
  Peptide Derived from Human Papillomavirus
TSETTYKNTNF

SEQ ID NO: 32400 - protein, 10 aa, Artificial Sequence
  Peptide Derived from Human Papillomavirus
TSFYNPDTQR

SEQ ID NO: 32401 - protein, 9 aa, Artificial Sequence
  Peptide Derived from Human Papillomavirus
TSICKYPDY

SEQ ID NO: 32402 - protein, 11 aa, Artificial Sequence
  Peptide Derived from Human Papillomavirus
TSICKYPDYIK

SEQ ID NO: 32403 - protein, 9 aa, Artificial Sequence
  Peptide Derived from Human Papillomavirus
TSQAIACQK

SEQ ID NO: 32404 - protein, 10 aa, Artificial Sequence
  Peptide Derived from Human Papillomavirus
TSQAIACQKH

SEQ ID NO: 32405 - protein, 9 aa, Artificial Sequence
  Peptide Derived from Human Papillomavirus
TSRLLAVGH

SEQ ID NO: 32406 - protein, 11 aa, Artificial Sequence
  Peptide Derived from Human Papillomavirus
TSRLLAVGHPY

SEQ ID NO: 32407 - protein, 8 aa, Artificial Sequence
  Peptide Derived from Human Papillomavirus
TSSTSTTA

SEQ ID NO: 32408 - protein, 9 aa, Artificial Sequence
  Peptide Derived from Human Papillomavirus
TSSTSTTAK

SEQ ID NO: 32409 - protein, 10 aa, Artificial Sequence
  Peptide Derived from Human Papillomavirus
TSSTSTTAKR

SEQ ID NO: 32410 - protein, 11 aa, Artificial Sequence
  Peptide Derived from Human Papillomavirus
TSSTSTTAKRK

SEQ ID NO: 32411 - protein, 8 aa, Artificial Sequence
  Peptide Derived from Human Papillomavirus
TSTTAKRK

SEQ ID NO: 32412 - protein, 9 aa, Artificial Sequence
  Peptide Derived from Human Papillomavirus
TSTTAKRKK

SEQ ID NO: 32413 - protein, 10 aa, Artificial Sequence
  Peptide Derived from Human Papillomavirus
TSTTAKRKKR

SEQ ID NO: 32414 - protein, 11 aa, Artificial Sequence
  Peptide Derived from Human Papillomavirus
TSTTAKRKKRK

SEQ ID NO: 32415 - protein, 8 aa, Artificial Sequence
  Peptide Derived from Human Papillomavirus
TTAKRKKR

SEQ ID NO: 32416 - protein, 9 aa, Artificial Sequence
  Peptide Derived from Human Papillomavirus
TTAKRKKRK

SEQ ID NO: 32417 - protein, 11 aa, Artificial Sequence
  Peptide Derived from Human Papillomavirus
TTRSTNMSLCA

SEQ ID NO: 32418 - protein, 9 aa, Artificial Sequence
  Peptide Derived from Human Papillomavirus
TTSSTSTTA

SEQ ID NO: 32419 - protein, 10 aa, Artificial Sequence
  Peptide Derived from Human Papillomavirus
TTSSTSTTAK

SEQ ID NO: 32420 - protein, 11 aa, Artificial Sequence
  Peptide Derived from Human Papillomavirus
TTSSTSTTAKR

SEQ ID NO: 32421 - protein, 8 aa, Artificial Sequence
  Peptide Derived from Human Papillomavirus
TTYKNTNF

SEQ ID NO: 32422 - protein, 9 aa, Artificial Sequence
  Peptide Derived from Human Papillomavirus
TTYKNTNFK

SEQ ID NO: 32423 - protein, 11 aa, Artificial Sequence
  Peptide Derived from Human Papillomavirus
TTYKNTNFKEY

SEQ ID NO: 32424 - protein, 11 aa, Artificial Sequence
  Peptide Derived from Human Papillomavirus
TVYLPPVPVSK

SEQ ID NO: 32425 - protein, 8 aa, Artificial Sequence
  Peptide Derived from Human Papillomavirus
VARTNIYY

SEQ ID NO: 32426 - protein, 9 aa, Artificial Sequence
  Peptide Derived from Human Papillomavirus
VARTNIYYH

SEQ ID NO: 32427 - protein, 10 aa, Artificial Sequence
  Peptide Derived from Human Papillomavirus
VARTNIYYHA

SEQ ID NO: 32428 - protein, 11 aa, Artificial Sequence
  Peptide Derived from Human Papillomavirus
VDNRECISMDY

SEQ ID NO: 32429 - protein, 10 aa, Artificial Sequence
  Peptide Derived from Human Papillomavirus
VDTGFGAMDF

SEQ ID NO: 32430 - protein, 11 aa, Artificial Sequence
  Peptide Derived from Human Papillomavirus
VFRIHLPDPNK

SEQ ID NO: 32431 - protein, 10 aa, Artificial Sequence
  Peptide Derived from Human Papillomavirus
VGENVPDDLY

SEQ ID NO: 32432 - protein, 9 aa, Artificial Sequence
  Peptide Derived from Human Papillomavirus
VGHPYFPIK

SEQ ID NO: 32433 - protein, 10 aa, Artificial Sequence
  Peptide Derived from Human Papillomavirus
VGHPYFPIKK

SEQ ID NO: 32434 - protein, 11 aa, Artificial Sequence
  Peptide Derived from Human Papillomavirus
VGISGHPLLNK

SEQ ID NO: 32435 - protein, 10 aa, Artificial Sequence
  Peptide Derived from Human Papillomavirus
VSEPYGDSLF

SEQ ID NO: 32436 - protein, 11 aa, Artificial Sequence
  Peptide Derived from Human Papillomavirus
VSEPYGDSLFF

SEQ ID NO: 32437 - protein, 9 aa, Artificial Sequence
  Peptide Derived from Human Papillomavirus
VSGLQYRVF

SEQ ID NO: 32438 - protein, 10 aa, Artificial Sequence
  Peptide Derived from Human Papillomavirus
VSGLQYRVFR

SEQ ID NO: 32439 - protein, 10 aa, Artificial Sequence
  Peptide Derived from Human Papillomavirus
VSKVVSTDEY

SEQ ID NO: 32440 - protein, 8 aa, Artificial Sequence
  Peptide Derived from Human Papillomavirus
VSTDEYVA

SEQ ID NO: 32441 - protein, 9 aa, Artificial Sequence
  Peptide Derived from Human Papillomavirus
VSTDEYVAR

SEQ ID NO: 32442 - protein, 8 aa, Artificial Sequence
  Peptide Derived from Human Papillomavirus
VTSDAQIF

SEQ ID NO: 32443 - protein, 10 aa, Artificial Sequence
  Peptide Derived from Human Papillomavirus
VTSDAQIFNK

SEQ ID NO: 32444 - protein, 10 aa, Artificial Sequence
  Peptide Derived from Human Papillomavirus
VTSQAIACQK

SEQ ID NO: 32445 - protein, 11 aa, Artificial Sequence
  Peptide Derived from Human Papillomavirus
VTSQAIACQKH

SEQ ID NO: 32446 - protein, 8 aa, Artificial Sequence
  Peptide Derived from Human Papillomavirus
VTVVDTTR

SEQ ID NO: 32447 - protein, 9 aa, Artificial Sequence
  Peptide Derived from Human Papillomavirus
VVSTDEYVA

SEQ ID NO: 32448 - protein, 10 aa, Artificial Sequence
  Peptide Derived from Human Papillomavirus
VVSTDEYVAR

SEQ ID NO: 32449 - protein, 10 aa, Artificial Sequence
  Peptide Derived from Human Papillomavirus
WACVGVEVGR

SEQ ID NO: 32450 - protein, 11 aa, Artificial Sequence
  Peptide Derived from Human Papillomavirus
WGKGSPCTNVA

SEQ ID NO: 32451 - protein, 9 aa, Artificial Sequence
  Peptide Derived from Human Papillomavirus
WLPSEATVY

SEQ ID NO: 32452 - protein, 8 aa, Artificial Sequence
  Peptide Derived from Human Papillomavirus
WLQRAQGH

SEQ ID NO: 32453 - protein, 10 aa, Artificial Sequence
  Peptide Derived from Human Papillomavirus
YAANAGVDNR

SEQ ID NO: 32454 - protein, 11 aa, Artificial Sequence
  Peptide Derived from Human Papillomavirus
YDLQFIFQLCK

SEQ ID NO: 32455 - protein, 11 aa, Artificial Sequence
  Peptide Derived from Human Papillomavirus
YFPIKKPNNNK

SEQ ID NO: 32456 - protein, 8 aa, Artificial Sequence
  Peptide Derived from Human Papillomavirus
YGDSLFFY

SEQ ID NO: 32457 - protein, 10 aa, Artificial Sequence
  Peptide Derived from Human Papillomavirus
YGDSLFFYLR

SEQ ID NO: 32458 - protein, 11 aa, Artificial Sequence
  Peptide Derived from Human Papillomavirus
YGDSLFFYLRR

SEQ ID NO: 32459 - protein, 9 aa, Artificial Sequence
  Peptide Derived from Human Papillomavirus
YIKGSGSTA

SEQ ID NO: 32460 - protein, 9 aa, Artificial Sequence
  Peptide Derived from Human Papillomavirus
YIKMVSEPY

SEQ ID NO: 32461 - protein, 8 aa, Artificial Sequence
  Peptide Derived from Human Papillomavirus
YILVITCY

SEQ ID NO: 32462 - protein, 9 aa, Artificial Sequence
  Peptide Derived from Human Papillomavirus
YLPPVPVSK

SEQ ID NO: 32463 - protein, 8 aa, Artificial Sequence
  Peptide Derived from Human Papillomavirus
YLRHGEEY

SEQ ID NO: 32464 - protein, 8 aa, Artificial Sequence
  Peptide Derived from Human Papillomavirus
YLRREQMF

SEQ ID NO: 32465 - protein, 10 aa, Artificial Sequence
  Peptide Derived from Human Papillomavirus
YLRREQMFVR

SEQ ID NO: 32466 - protein, 11 aa, Artificial Sequence
  Peptide Derived from Human Papillomavirus
YLRREQMFVRH

SEQ ID NO: 32467 - protein, 9 aa, Artificial Sequence
  Peptide Derived from Human Papillomavirus
YTFWEVNLK

SEQ ID NO: 32468 - protein, 11 aa, Artificial Sequence
  Peptide Derived from Human Papillomavirus
YTFWEVNLKEK

SEQ ID NO: 32469 - protein, 8 aa, Artificial Sequence
  Peptide Derived from Human Papillomavirus
YVARTNIY

SEQ ID NO: 32470 - protein, 9 aa, Artificial Sequence
  Peptide Derived from Human Papillomavirus
YVARTNIYY

SEQ ID NO: 32471 - protein, 10 aa, Artificial Sequence
  Peptide Derived from Human Papillomavirus
YVARTNIYYH

SEQ ID NO: 32472 - protein, 11 aa, Artificial Sequence
  Peptide Derived from Human Papillomavirus
YVARTNIYYHA

SEQ ID NO: 32473 - protein, 9 aa, Artificial Sequence
  Peptide Derived from Human Papillomavirus
ADAGDFYLH

SEQ ID NO: 32474 - protein, 8 aa, Artificial Sequence
  Peptide Derived from Human Papillomavirus
AFITTPTK

SEQ ID NO: 32475 - protein, 10 aa, Artificial Sequence
  Peptide Derived from Human Papillomavirus
AGDFYLHPSY

SEQ ID NO: 32476 - protein, 11 aa, Artificial Sequence
  Peptide Derived from Human Papillomavirus
AGDFYLHPSYY

SEQ ID NO: 32477 - protein, 11 aa, Artificial Sequence
  Peptide Derived from Human Papillomavirus
AGTCPPDIIPK

SEQ ID NO: 32478 - protein, 10 aa, Artificial Sequence
  Peptide Derived from Human Papillomavirus
ALHRPALTSR

SEQ ID NO: 32479 - protein, 11 aa, Artificial Sequence
  Peptide Derived from Human Papillomavirus
ALHRPALTSRR

SEQ ID NO: 32480 - protein, 11 aa, Artificial Sequence
  Peptide Derived from Human Papillomavirus
ALPTSINNGLY

SEQ ID NO: 32481 - protein, 10 aa, Artificial Sequence
  Peptide Derived from Human Papillomavirus
ALTSRRTGIR

SEQ ID NO: 32482 - protein, 11 aa, Artificial Sequence
  Peptide Derived from Human Papillomavirus
ALTSRRTGIRY

SEQ ID NO: 32483 - protein, 8 aa, Artificial Sequence
  Peptide Derived from Human Papillomavirus
ASATQLYK

SEQ ID NO: 32484 - protein, 11 aa, Artificial Sequence
  Peptide Derived from Human Papillomavirus
ASATQLYKTCK

SEQ ID NO: 32485 - protein, 9 aa, Artificial Sequence
  Peptide Derived from Human Papillomavirus
ATDTLAPVR

SEQ ID NO: 32486 - protein, 9 aa, Artificial Sequence
  Peptide Derived from Human Papillomavirus
ATQLYKTCK

SEQ ID NO: 32487 - protein, 11 aa, Artificial Sequence
  Peptide Derived from Human Papillomavirus
ATQLYKTCKQA

SEQ ID NO: 32488 - protein, 8 aa, Artificial Sequence
  Peptide Derived from Human Papillomavirus
DAGDFYLH

SEQ ID NO: 32489 - protein, 11 aa, Artificial Sequence
  Peptide Derived from Human Papillomavirus
DAGDFYLHPSY

SEQ ID NO: 32490 - protein, 9 aa, Artificial Sequence
  Peptide Derived from Human Papillomavirus
DFLDIVALH

SEQ ID NO: 32491 - protein, 10 aa, Artificial Sequence
  Peptide Derived from Human Papillomavirus
DFLDIVALHR

SEQ ID NO: 32492 - protein, 8 aa, Artificial Sequence
  Peptide Derived from Human Papillomavirus
DFSTIDSA

SEQ ID NO: 32493 - protein, 8 aa, Artificial Sequence
  Peptide Derived from Human Papillomavirus
DFYLHPSY

SEQ ID NO: 32494 - protein, 9 aa, Artificial Sequence
  Peptide Derived from Human Papillomavirus
DFYLHPSYY

SEQ ID NO: 32495 - protein, 9 aa, Artificial Sequence
  Peptide Derived from Human Papillomavirus
DIIPKVEGK

SEQ ID NO: 32496 - protein, 10 aa, Artificial Sequence
  Peptide Derived from Human Papillomavirus
DIPINITDQA

SEQ ID NO: 32497 - protein, 9 aa, Artificial Sequence
  Peptide Derived from Human Papillomavirus
DIVALHRPA

SEQ ID NO: 32498 - protein, 8 aa, Artificial Sequence
  Peptide Derived from Human Papillomavirus
DVDNTLYF

SEQ ID NO: 32499 - protein, 10 aa, Artificial Sequence
  Peptide Derived from Human Papillomavirus
EGIDVDNTLY

SEQ ID NO: 32500 - protein, 11 aa, Artificial Sequence
  Peptide Derived from Human Papillomavirus
EGIDVDNTLYF

SEQ ID NO: 32501 - protein, 10 aa, Artificial Sequence
  Peptide Derived from Human Papillomavirus
ELQTITPSTY

SEQ ID NO: 32502 - protein, 9 aa, Artificial Sequence
  Peptide Derived from Human Papillomavirus
ETSFIDAGA

SEQ ID NO: 32503 - protein, 8 aa, Artificial Sequence
  Peptide Derived from Human Papillomavirus
FFSDVSLA

SEQ ID NO: 32504 - protein, 9 aa, Artificial Sequence
  Peptide Derived from Human Papillomavirus
FFSDVSLAA

SEQ ID NO: 32505 - protein, 11 aa, Artificial Sequence
  Peptide Derived from Human Papillomavirus
FITTPTKLITY

SEQ ID NO: 32506 - protein, 8 aa, Artificial Sequence
  Peptide Derived from Human Papillomavirus
FLDIVALH

SEQ ID NO: 32507 - protein, 9 aa, Artificial Sequence
  Peptide Derived from Human Papillomavirus
FLDIVALHR

SEQ ID NO: 32508 - protein, 11 aa, Artificial Sequence
  Peptide Derived from Human Papillomavirus
FLDIVALHRPA

SEQ ID NO: 32509 - protein, 8 aa, Artificial Sequence
  Peptide Derived from Human Papillomavirus
FSDVSLAA

SEQ ID NO: 32510 - protein, 11 aa, Artificial Sequence
  Peptide Derived from Human Papillomavirus
FSSNDNSINIA

SEQ ID NO: 32511 - protein, 11 aa, Artificial Sequence
  Peptide Derived from Human Papillomavirus
FTLSSSTISTH

SEQ ID NO: 32512 - protein, 8 aa, Artificial Sequence
  Peptide Derived from Human Papillomavirus
GAKVHYYY

SEQ ID NO: 32513 - protein, 10 aa, Artificial Sequence
  Peptide Derived from Human Papillomavirus
GAKVHYYYDF

SEQ ID NO: 32514 - protein, 9 aa, Artificial Sequence
  Peptide Derived from Human Papillomavirus
GDFYLHPSY

SEQ ID NO: 32515 - protein, 10 aa, Artificial Sequence
  Peptide Derived from Human Papillomavirus
GDFYLHPSYY

SEQ ID NO: 32516 - protein, 9 aa, Artificial Sequence
  Peptide Derived from Human Papillomavirus
GIDVDNTLY

SEQ ID NO: 32517 - protein, 10 aa, Artificial Sequence
  Peptide Derived from Human Papillomavirus
GIDVDNTLYF

SEQ ID NO: 32518 - protein, 11 aa, Artificial Sequence
  Peptide Derived from Human Papillomavirus
GIGTGSGTGGR

SEQ ID NO: 32519 - protein, 10 aa, Artificial Sequence
  Peptide Derived from Human Papillomavirus
GIRYSRIGNK

SEQ ID NO: 32520 - protein, 10 aa, Artificial Sequence
  Peptide Derived from Human Papillomavirus
GLYDIYADDF

SEQ ID NO: 32521 - protein, 11 aa, Artificial Sequence
  Peptide Derived from Human Papillomavirus
GLYSRTTQQVK

SEQ ID NO: 32522 - protein, 10 aa, Artificial Sequence
  Peptide Derived from Human Papillomavirus
GSGTGGRTGY

SEQ ID NO: 32523 - protein, 9 aa, Artificial Sequence
  Peptide Derived from Human Papillomavirus
GSPQYTIIA

SEQ ID NO: 32524 - protein, 11 aa, Artificial Sequence
  Peptide Derived from Human Papillomavirus
GSPQYTIIADA

SEQ ID NO: 32525 - protein, 11 aa, Artificial Sequence
  Peptide Derived from Human Papillomavirus
GSRPVARLGLY

SEQ ID NO: 32526 - protein, 10 aa, Artificial Sequence
  Peptide Derived from Human Papillomavirus
GTCPPDIIPK

SEQ ID NO: 32527 - protein, 8 aa, Artificial Sequence
  Peptide Derived from Human Papillomavirus
GTGGRTGY

SEQ ID NO: 32528 - protein, 9 aa, Artificial Sequence
  Peptide Derived from Human Papillomavirus
GTGSGTGGR

SEQ ID NO: 32529 - protein, 8 aa, Artificial Sequence
  Peptide Derived from Human Papillomavirus
IADAGDFY

SEQ ID NO: 32530 - protein, 10 aa, Artificial Sequence
  Peptide Derived from Human Papillomavirus
IADAGDFYLH

SEQ ID NO: 32531 - protein, 8 aa, Artificial Sequence
  Peptide Derived from Human Papillomavirus
IADQILQY

SEQ ID NO: 32532 - protein, 8 aa, Artificial Sequence
  Peptide Derived from Human Papillomavirus
IDVDNTLY

SEQ ID NO: 32533 - protein, 9 aa, Artificial Sequence
  Peptide Derived from Human Papillomavirus
IDVDNTLYF

SEQ ID NO: 32534 - protein, 8 aa, Artificial Sequence
  Peptide Derived from Human Papillomavirus
IGAKVHYY

SEQ ID NO: 32535 - protein, 9 aa, Artificial Sequence
  Peptide Derived from Human Papillomavirus
IGAKVHYYY

SEQ ID NO: 32536 - protein, 11 aa, Artificial Sequence
  Peptide Derived from Human Papillomavirus
IGAKVHYYYDF

SEQ ID NO: 32537 - protein, 8 aa, Artificial Sequence
  Peptide Derived from Human Papillomavirus
IGNKQTLR

SEQ ID NO: 32538 - protein, 10 aa, Artificial Sequence
  Peptide Derived from Human Papillomavirus
IGNKQTLRTR

SEQ ID NO: 32539 - protein, 10 aa, Artificial Sequence
  Peptide Derived from Human Papillomavirus
IGTGSGTGGR

SEQ ID NO: 32540 - protein, 8 aa, Artificial Sequence
  Peptide Derived from Human Papillomavirus
IIADAGDF

SEQ ID NO: 32541 - protein, 9 aa, Artificial Sequence
  Peptide Derived from Human Papillomavirus
IIADAGDFY

SEQ ID NO: 32542 - protein, 11 aa, Artificial Sequence
  Peptide Derived from Human Papillomavirus
IIADAGDFYLH

SEQ ID NO: 32543 - protein, 8 aa, Artificial Sequence
  Peptide Derived from Human Papillomavirus
IIPKVEGK

SEQ ID NO: 32544 - protein, 11 aa, Artificial Sequence
  Peptide Derived from Human Papillomavirus
IIPKVEGKTIA

SEQ ID NO: 32545 - protein, 10 aa, Artificial Sequence
  Peptide Derived from Human Papillomavirus
ILQYGSMGVF

SEQ ID NO: 32546 - protein, 11 aa, Artificial Sequence
  Peptide Derived from Human Papillomavirus
ILQYGSMGVFF

SEQ ID NO: 32547 - protein, 11 aa, Artificial Sequence
  Peptide Derived from Human Papillomavirus
ITPSTYTTTSH

SEQ ID NO: 32548 - protein, 10 aa, Artificial Sequence
  Peptide Derived from Human Papillomavirus
ITTPTKLITY

SEQ ID NO: 32549 - protein, 10 aa, Artificial Sequence
  Peptide Derived from Human Papillomavirus
ITTSTDTTPA

SEQ ID NO: 32550 - protein, 8 aa, Artificial Sequence
  Peptide Derived from Human Papillomavirus
ITYDNPAY

SEQ ID NO: 32551 - protein, 8 aa, Artificial Sequence
  Peptide Derived from Human Papillomavirus
IVALHRPA

SEQ ID NO: 32552 - protein, 8 aa, Artificial Sequence
  Peptide Derived from Human Papillomavirus
IVPGSPQY

SEQ ID NO: 32553 - protein, 10 aa, Artificial Sequence
  Peptide Derived from Human Papillomavirus
IVSLVEETSF

SEQ ID NO: 32554 - protein, 9 aa, Artificial Sequence
  Peptide Derived from Human Papillomavirus
KLITYDNPA

SEQ ID NO: 32555 - protein, 10 aa, Artificial Sequence
  Peptide Derived from Human Papillomavirus
KLITYDNPAY

SEQ ID NO: 32556 - protein, 8 aa, Artificial Sequence
  Peptide Derived from Human Papillomavirus
KSIGAKVH

SEQ ID NO: 32557 - protein, 9 aa, Artificial Sequence
  Peptide Derived from Human Papillomavirus
KSIGAKVHY

SEQ ID NO: 32558 - protein, 10 aa, Artificial Sequence
  Peptide Derived from Human Papillomavirus
KSIGAKVHYY

SEQ ID NO: 32559 - protein, 11 aa, Artificial Sequence
  Peptide Derived from Human Papillomavirus
KSIGAKVHYYY

SEQ ID NO: 32560 - protein, 10 aa, Artificial Sequence
  Peptide Derived from Human Papillomavirus
KTIADQILQY

SEQ ID NO: 32561 - protein, 8 aa, Artificial Sequence
  Peptide Derived from Human Papillomavirus
KVEGKTIA

SEQ ID NO: 32562 - protein, 8 aa, Artificial Sequence
  Peptide Derived from Human Papillomavirus
KVHYYYDF

SEQ ID NO: 32563 - protein, 8 aa, Artificial Sequence
  Peptide Derived from Human Papillomavirus
LDIVALHR

SEQ ID NO: 32564 - protein, 10 aa, Artificial Sequence
  Peptide Derived from Human Papillomavirus
LDIVALHRPA

SEQ ID NO: 32565 - protein, 8 aa, Artificial Sequence
  Peptide Derived from Human Papillomavirus
LGTRPPTA

SEQ ID NO: 32566 - protein, 11 aa, Artificial Sequence
  Peptide Derived from Human Papillomavirus
LIPIVPGSPQY

SEQ ID NO: 32567 - protein, 8 aa, Artificial Sequence
  Peptide Derived from Human Papillomavirus
LITYDNPA

SEQ ID NO: 32568 - protein, 9 aa, Artificial Sequence
  Peptide Derived from Human Papillomavirus
LITYDNPAY

SEQ ID NO: 32569 - protein, 9 aa, Artificial Sequence
  Peptide Derived from Human Papillomavirus
LSSSTISTH

SEQ ID NO: 32570 - protein, 11 aa, Artificial Sequence
  Peptide Derived from Human Papillomavirus
LSSSTISTHNY

SEQ ID NO: 32571 - protein, 9 aa, Artificial Sequence
  Peptide Derived from Human Papillomavirus
LTSRRTGIR

SEQ ID NO: 32572 - protein, 10 aa, Artificial Sequence
  Peptide Derived from Human Papillomavirus
LTSRRTGIRY

SEQ ID NO: 32573 - protein, 10 aa, Artificial Sequence
  Peptide Derived from Human Papillomavirus
LVEETSFIDA

SEQ ID NO: 32574 - protein, 8 aa, Artificial Sequence
  Peptide Derived from Human Papillomavirus
MLRKRRKR

SEQ ID NO: 32575 - protein, 11 aa, Artificial Sequence
  Peptide Derived from Human Papillomavirus
MLRKRRKRLPY

SEQ ID NO: 32576 - protein, 8 aa, Artificial Sequence
  Peptide Derived from Human Papillomavirus
NDNSINIA

SEQ ID NO: 32577 - protein, 8 aa, Artificial Sequence
  Peptide Derived from Human Papillomavirus
NGLYDIYA

SEQ ID NO: 32578 - protein, 11 aa, Artificial Sequence
  Peptide Derived from Human Papillomavirus
NGLYDIYADDF

SEQ ID NO: 32579 - protein, 8 aa, Artificial Sequence
  Peptide Derived from Human Papillomavirus
NIAPDPDF

SEQ ID NO: 32580 - protein, 11 aa, Artificial Sequence
  Peptide Derived from Human Papillomavirus
NSINIAPDPDF

SEQ ID NO: 32581 - protein, 9 aa, Artificial Sequence
  Peptide Derived from Human Papillomavirus
NTTIPFGGA

SEQ ID NO: 32582 - protein, 10 aa, Artificial Sequence
  Peptide Derived from Human Papillomavirus
NTTIPFGGAY

SEQ ID NO: 32583 - protein, 9 aa, Artificial Sequence
  Peptide Derived from Human Papillomavirus
NTVTTVTTH

SEQ ID NO: 32584 - protein, 8 aa, Artificial Sequence
  Peptide Derived from Human Papillomavirus
PAETGGHF

SEQ ID NO: 32585 - protein, 9 aa, Artificial Sequence
  Peptide Derived from Human Papillomavirus
PAFITTPTK

SEQ ID NO: 32586 - protein, 11 aa, Artificial Sequence
  Peptide Derived from Human Papillomavirus
PALTSRRTGIR

SEQ ID NO: 32587 - protein, 8 aa, Artificial Sequence
  Peptide Derived from Human Papillomavirus
PANTTIPF

SEQ ID NO: 32588 - protein, 11 aa, Artificial Sequence
  Peptide Derived from Human Papillomavirus
PANTTIPFGGA

SEQ ID NO: 32589 - protein, 8 aa, Artificial Sequence
  Peptide Derived from Human Papillomavirus
PDFLDIVA

SEQ ID NO: 32590 - protein, 10 aa, Artificial Sequence
  Peptide Derived from Human Papillomavirus
PDFLDIVALH

SEQ ID NO: 32591 - protein, 11 aa, Artificial Sequence
  Peptide Derived from Human Papillomavirus
PDFLDIVALHR

SEQ ID NO: 32592 - protein, 10 aa, Artificial Sequence
  Peptide Derived from Human Papillomavirus
PDIIPKVEGK

SEQ ID NO: 32593 - protein, 11 aa, Artificial Sequence
  Peptide Derived from Human Papillomavirus
PDIPINITDQA

SEQ ID NO: 32594 - protein, 10 aa, Artificial Sequence
  Peptide Derived from Human Papillomavirus
PDPDFLDIVA

SEQ ID NO: 32595 - protein, 10 aa, Artificial Sequence
  Peptide Derived from Human Papillomavirus
PGSPQYTIIA

SEQ ID NO: 32596 - protein, 8 aa, Artificial Sequence
  Peptide Derived from Human Papillomavirus
PGSRPVAR

SEQ ID NO: 32597 - protein, 8 aa, Artificial Sequence
  Peptide Derived from Human Papillomavirus
PINITDQA

SEQ ID NO: 32598 - protein, 9 aa, Artificial Sequence
  Peptide Derived from Human Papillomavirus
PIPGSRPVA

SEQ ID NO: 32599 - protein, 10 aa, Artificial Sequence
  Peptide Derived from Human Papillomavirus
PIPGSRPVAR

SEQ ID NO: 32600 - protein, 9 aa, Artificial Sequence
  Peptide Derived from Human Papillomavirus
PIVPGSPQY

SEQ ID NO: 32601 - protein, 9 aa, Artificial Sequence
  Peptide Derived from Human Papillomavirus
PLGTRPPTA

SEQ ID NO: 32602 - protein, 10 aa, Artificial Sequence
  Peptide Derived from Human Papillomavirus
PSIPPDVSGF

SEQ ID NO: 32603 - protein, 8 aa, Artificial Sequence
  Peptide Derived from Human Papillomavirus
PSTSLSGY

SEQ ID NO: 32604 - protein, 11 aa, Artificial Sequence
  Peptide Derived from Human Papillomavirus
PSTSLSGYIPA

SEQ ID NO: 32605 - protein, 9 aa, Artificial Sequence
  Peptide Derived from Human Papillomavirus
PSTYTTTSH

SEQ ID NO: 32606 - protein, 10 aa, Artificial Sequence
  Peptide Derived from Human Papillomavirus
PSTYTTTSHA

SEQ ID NO: 32607 - protein, 11 aa, Artificial Sequence
  Peptide Derived from Human Papillomavirus
PSTYTTTSHAA

SEQ ID NO: 32608 - protein, 10 aa, Artificial Sequence
  Peptide Derived from Human Papillomavirus
PSVLQPPTPA

SEQ ID NO: 32609 - protein, 11 aa, Artificial Sequence
  Peptide Derived from Human Papillomavirus
PSVPSTSLSGY

SEQ ID NO: 32610 - protein, 8 aa, Artificial Sequence
  Peptide Derived from Human Papillomavirus
PSYYMLRK

SEQ ID NO: 32611 - protein, 9 aa, Artificial Sequence
  Peptide Derived from Human Papillomavirus
PSYYMLRKR

SEQ ID NO: 32612 - protein, 10 aa, Artificial Sequence
  Peptide Derived from Human Papillomavirus
PSYYMLRKRR

SEQ ID NO: 32613 - protein, 11 aa, Artificial Sequence
  Peptide Derived from Human Papillomavirus
PSYYMLRKRRK

SEQ ID NO: 32614 - protein, 8 aa, Artificial Sequence
  Peptide Derived from Human Papillomavirus
PTATDTLA

SEQ ID NO: 32615 - protein, 11 aa, Artificial Sequence
  Peptide Derived from Human Papillomavirus
PTATDTLAPVR

SEQ ID NO: 32616 - protein, 11 aa, Artificial Sequence
  Peptide Derived from Human Papillomavirus
PTKLITYDNPA

SEQ ID NO: 32617 - protein, 9 aa, Artificial Sequence
  Peptide Derived from Human Papillomavirus
PTPAETGGH

SEQ ID NO: 32618 - protein, 10 aa, Artificial Sequence
  Peptide Derived from Human Papillomavirus
PTPAETGGHF

SEQ ID NO: 32619 - protein, 9 aa, Artificial Sequence
  Peptide Derived from Human Papillomavirus
PTSINNGLY

SEQ ID NO: 32620 - protein, 8 aa, Artificial Sequence
  Peptide Derived from Human Papillomavirus
PVARLGLY

SEQ ID NO: 32621 - protein, 10 aa, Artificial Sequence
  Peptide Derived from Human Papillomavirus
PVARLGLYSR

SEQ ID NO: 32622 - protein, 11 aa, Artificial Sequence
  Peptide Derived from Human Papillomavirus
QILQYGSMGVF

SEQ ID NO: 32623 - protein, 9 aa, Artificial Sequence
  Peptide Derived from Human Papillomavirus
QLYKTCKQA

SEQ ID NO: 32624 - protein, 8 aa, Artificial Sequence
  Peptide Derived from Human Papillomavirus
QTITPSTY

SEQ ID NO: 32625 - protein, 9 aa, Artificial Sequence
  Peptide Derived from Human Papillomavirus
QTLRTRSGK

SEQ ID NO: 32626 - protein, 8 aa, Artificial Sequence
  Peptide Derived from Human Papillomavirus
QVKVVDPA

SEQ ID NO: 32627 - protein, 9 aa, Artificial Sequence
  Peptide Derived from Human Papillomavirus
QVKVVDPAF

SEQ ID NO: 32628 - protein, 8 aa, Artificial Sequence
  Peptide Derived from Human Papillomavirus
RASATQLY

SEQ ID NO: 32629 - protein, 9 aa, Artificial Sequence
  Peptide Derived from Human Papillomavirus
RASATQLYK

SEQ ID NO: 32630 - protein, 9 aa, Artificial Sequence
  Peptide Derived from Human Papillomavirus
RIGNKQTLR

SEQ ID NO: 32631 - protein, 11 aa, Artificial Sequence
  Peptide Derived from Human Papillomavirus
RIGNKQTLRTR

SEQ ID NO: 32632 - protein, 8 aa, Artificial Sequence
  Peptide Derived from Human Papillomavirus
RSAKRTKR

SEQ ID NO: 32633 - protein, 9 aa, Artificial Sequence
  Peptide Derived from Human Papillomavirus
RSAKRTKRA

SEQ ID NO: 32634 - protein, 11 aa, Artificial Sequence
  Peptide Derived from Human Papillomavirus
RSAKRTKRASA

SEQ ID NO: 32635 - protein, 8 aa, Artificial Sequence
  Peptide Derived from Human Papillomavirus
RSGKSIGA

SEQ ID NO: 32636 - protein, 9 aa, Artificial Sequence
  Peptide Derived from Human Papillomavirus
RSGKSIGAK

SEQ ID NO: 32637 - protein, 11 aa, Artificial Sequence
  Peptide Derived from Human Papillomavirus
RSGKSIGAKVH

SEQ ID NO: 32638 - protein, 8 aa, Artificial Sequence
  Peptide Derived from Human Papillomavirus
RTGIRYSR

SEQ ID NO: 32639 - protein, 10 aa, Artificial Sequence
  Peptide Derived from Human Papillomavirus
RTGYIPLGTR

SEQ ID NO: 32640 - protein, 11 aa, Artificial Sequence
  Peptide Derived from Human Papillomavirus
RTKRASATQLY

SEQ ID NO: 32641 - protein, 10 aa, Artificial Sequence
  Peptide Derived from Human Papillomavirus
RTRSGKSIGA

SEQ ID NO: 32642 - protein, 11 aa, Artificial Sequence
  Peptide Derived from Human Papillomavirus
RTRSGKSIGAK

SEQ ID NO: 32643 - protein, 8 aa, Artificial Sequence
  Peptide Derived from Human Papillomavirus
SAKRTKRA

SEQ ID NO: 32644 - protein, 10 aa, Artificial Sequence
  Peptide Derived from Human Papillomavirus
SAKRTKRASA

SEQ ID NO: 32645 - protein, 10 aa, Artificial Sequence
  Peptide Derived from Human Papillomavirus
SATQLYKTCK

SEQ ID NO: 32646 - protein, 8 aa, Artificial Sequence
  Peptide Derived from Human Papillomavirus
SGKSIGAK

SEQ ID NO: 32647 - protein, 10 aa, Artificial Sequence
  Peptide Derived from Human Papillomavirus
SGKSIGAKVH

SEQ ID NO: 32648 - protein, 11 aa, Artificial Sequence
  Peptide Derived from Human Papillomavirus
SGKSIGAKVHY

SEQ ID NO: 32649 - protein, 9 aa, Artificial Sequence
  Peptide Derived from Human Papillomavirus
SGTGGRTGY

SEQ ID NO: 32650 - protein, 8 aa, Artificial Sequence
  Peptide Derived from Human Papillomavirus
SIGAKVHY

SEQ ID NO: 32651 - protein, 9 aa, Artificial Sequence
  Peptide Derived from Human Papillomavirus
SIGAKVHYY

SEQ ID NO: 32652 - protein, 10 aa, Artificial Sequence
  Peptide Derived from Human Papillomavirus
SIGAKVHYYY

SEQ ID NO: 32653 - protein, 10 aa, Artificial Sequence
  Peptide Derived from Human Papillomavirus
SINIAPDPDF

SEQ ID NO: 32654 - protein, 10 aa, Artificial Sequence
  Peptide Derived from Human Papillomavirus
SINNGLYDIY

SEQ ID NO: 32655 - protein, 11 aa, Artificial Sequence
  Peptide Derived from Human Papillomavirus
SINNGLYDIYA

SEQ ID NO: 32656 - protein, 9 aa, Artificial Sequence
  Peptide Derived from Human Papillomavirus
SIPPDVSGF

SEQ ID NO: 32657 - protein, 11 aa, Artificial Sequence
  Peptide Derived from Human Papillomavirus
SITTSTDTTPA

SEQ ID NO: 32658 - protein, 11 aa, Artificial Sequence
  Peptide Derived from Human Papillomavirus
SIVSLVEETSF

SEQ ID NO: 32659 - protein, 8 aa, Artificial Sequence
  Peptide Derived from Human Papillomavirus
SLSGYIPA

SEQ ID NO: 32660 - protein, 8 aa, Artificial Sequence
  Peptide Derived from Human Papillomavirus
SLVEETSF

SEQ ID NO: 32661 - protein, 11 aa, Artificial Sequence
  Peptide Derived from Human Papillomavirus
SLVEETSFIDA

SEQ ID NO: 32662 - protein, 10 aa, Artificial Sequence
  Peptide Derived from Human Papillomavirus
SSNDNSINIA

SEQ ID NO: 32663 - protein, 8 aa, Artificial Sequence
  Peptide Derived from Human Papillomavirus
SSSTISTH

SEQ ID NO: 32664 - protein, 10 aa, Artificial Sequence
  Peptide Derived from Human Papillomavirus
SSSTISTHNY

SEQ ID NO: 32665 - protein, 9 aa, Artificial Sequence
  Peptide Derived from Human Papillomavirus
SSTISTHNY

SEQ ID NO: 32666 - protein, 9 aa, Artificial Sequence
  Peptide Derived from Human Papillomavirus
SSTPIPGSR

SEQ ID NO: 32667 - protein, 8 aa, Artificial Sequence
  Peptide Derived from Human Papillomavirus
STISTHNY

SEQ ID NO: 32668 - protein, 8 aa, Artificial Sequence
  Peptide Derived from Human Papillomavirus
STPIPGSR

SEQ ID NO: 32669 - protein, 11 aa, Artificial Sequence
  Peptide Derived from Human Papillomavirus
STPIPGSRPVA

SEQ ID NO: 32670 - protein, 10 aa, Artificial Sequence
  Peptide Derived from Human Papillomavirus
STSLSGYIPA

SEQ ID NO: 32671 - protein, 8 aa, Artificial Sequence
  Peptide Derived from Human Papillomavirus
STYTTTSH

SEQ ID NO: 32672 - protein, 9 aa, Artificial Sequence
  Peptide Derived from Human Papillomavirus
STYTTTSHA

SEQ ID NO: 32673 - protein, 10 aa, Artificial Sequence
  Peptide Derived from Human Papillomavirus
STYTTTSHAA

SEQ ID NO: 32674 - protein, 9 aa, Artificial Sequence
  Peptide Derived from Human Papillomavirus
SVLQPPTPA

SEQ ID NO: 32675 - protein, 10 aa, Artificial Sequence
  Peptide Derived from Human Papillomavirus
SVPSTSLSGY

SEQ ID NO: 32676 - protein, 10 aa, Artificial Sequence
  Peptide Derived from Human Papillomavirus
TATDTLAPVR

SEQ ID NO: 32677 - protein, 9 aa, Artificial Sequence
  Peptide Derived from Human Papillomavirus
TCPPDIIPK

SEQ ID NO: 32678 - protein, 8 aa, Artificial Sequence
  Peptide Derived from Human Papillomavirus
TDTLAPVR

SEQ ID NO: 32679 - protein, 11 aa, Artificial Sequence
  Peptide Derived from Human Papillomavirus
TGIRYSRIGNK

SEQ ID NO: 32680 - protein, 8 aa, Artificial Sequence
  Peptide Derived from Human Papillomavirus
TGSGTGGR

SEQ ID NO: 32681 - protein, 11 aa, Artificial Sequence
  Peptide Derived from Human Papillomavirus
TGSGTGGRTGY

SEQ ID NO: 32682 - protein, 9 aa, Artificial Sequence
  Peptide Derived from Human Papillomavirus
TGYIPLGTR

SEQ ID NO: 32683 - protein, 9 aa, Artificial Sequence
  Peptide Derived from Human Papillomavirus
TIADQILQY

SEQ ID NO: 32684 - protein, 9 aa, Artificial Sequence
  Peptide Derived from Human Papillomavirus
TIIADAGDF

SEQ ID NO: 32685 - protein, 10 aa, Artificial Sequence
  Peptide Derived from Human Papillomavirus
TIIADAGDFY

SEQ ID NO: 32686 - protein, 8 aa, Artificial Sequence
  Peptide Derived from Human Papillomavirus
TIPFGGAY

SEQ ID NO: 32687 - protein, 8 aa, Artificial Sequence
  Peptide Derived from Human Papillomavirus
TLRTRSGK

SEQ ID NO: 32688 - protein, 10 aa, Artificial Sequence
  Peptide Derived from Human Papillomavirus
TLSSSTISTH

SEQ ID NO: 32689 - protein, 8 aa, Artificial Sequence
  Peptide Derived from Human Papillomavirus
TSFIDAGA

SEQ ID NO: 32690 - protein, 8 aa, Artificial Sequence
  Peptide Derived from Human Papillomavirus
TSINNGLY

SEQ ID NO: 32691 - protein, 11 aa, Artificial Sequence
  Peptide Derived from Human Papillomavirus
TSINNGLYDIY

SEQ ID NO: 32692 - protein, 9 aa, Artificial Sequence
  Peptide Derived from Human Papillomavirus
TSLSGYIPA

SEQ ID NO: 32693 - protein, 8 aa, Artificial Sequence
  Peptide Derived from Human Papillomavirus
TSRRTGIR

SEQ ID NO: 32694 - protein, 9 aa, Artificial Sequence
  Peptide Derived from Human Papillomavirus
TSRRTGIRY

SEQ ID NO: 32695 - protein, 11 aa, Artificial Sequence
  Peptide Derived from Human Papillomavirus
TSRRTGIRYSR

SEQ ID NO: 32696 - protein, 10 aa, Artificial Sequence
  Peptide Derived from Human Papillomavirus
TSSTPIPGSR

SEQ ID NO: 32697 - protein, 8 aa, Artificial Sequence
  Peptide Derived from Human Papillomavirus
TSTDTTPA

SEQ ID NO: 32698 - protein, 8 aa, Artificial Sequence
  Peptide Derived from Human Papillomavirus
TTHNNPTF

SEQ ID NO: 32699 - protein, 8 aa, Artificial Sequence
  Peptide Derived from Human Papillomavirus
TTIPFGGA

SEQ ID NO: 32700 - protein, 9 aa, Artificial Sequence
  Peptide Derived from Human Papillomavirus
TTIPFGGAY

SEQ ID NO: 32701 - protein, 9 aa, Artificial Sequence
  Peptide Derived from Human Papillomavirus
TTPTKLITY

SEQ ID NO: 32702 - protein, 11 aa, Artificial Sequence
  Peptide Derived from Human Papillomavirus
TTQQVKVVDPA

SEQ ID NO: 32703 - protein, 9 aa, Artificial Sequence
  Peptide Derived from Human Papillomavirus
TTSTDTTPA

SEQ ID NO: 32704 - protein, 11 aa, Artificial Sequence
  Peptide Derived from Human Papillomavirus
TTVTTHNNPTF

SEQ ID NO: 32705 - protein, 10 aa, Artificial Sequence
  Peptide Derived from Human Papillomavirus
TVTTHNNPTF

SEQ ID NO: 32706 - protein, 8 aa, Artificial Sequence
  Peptide Derived from Human Papillomavirus
TVTTVTTH

SEQ ID NO: 32707 - protein, 11 aa, Artificial Sequence
  Peptide Derived from Human Papillomavirus
VALHRPALTSR

SEQ ID NO: 32708 - protein, 9 aa, Artificial Sequence
  Peptide Derived from Human Papillomavirus
VARLGLYSR

SEQ ID NO: 32709 - protein, 11 aa, Artificial Sequence
  Peptide Derived from Human Papillomavirus
VDPAFITTPTK

SEQ ID NO: 32710 - protein, 8 aa, Artificial Sequence
  Peptide Derived from Human Papillomavirus
VLQPPTPA

SEQ ID NO: 32711 - protein, 9 aa, Artificial Sequence
  Peptide Derived from Human Papillomavirus
VSLVEETSF

SEQ ID NO: 32712 - protein, 11 aa, Artificial Sequence
  Peptide Derived from Human Papillomavirus
VTSSTPIPGSR

SEQ ID NO: 32713 - protein, 9 aa, Artificial Sequence
  Peptide Derived from Human Papillomavirus
VTTHNNPTF

SEQ ID NO: 32714 - protein, 9 aa, Artificial Sequence
  Peptide Derived from Human Papillomavirus
YDFSTIDSA

SEQ ID NO: 32715 - protein, 8 aa, Artificial Sequence
  Peptide Derived from Human Papillomavirus
YDIYADDF

SEQ ID NO: 32716 - protein, 9 aa, Artificial Sequence
  Peptide Derived from Human Papillomavirus
YFFSDVSLA

SEQ ID NO: 32717 - protein, 10 aa, Artificial Sequence
  Peptide Derived from Human Papillomavirus
YFFSDVSLAA

SEQ ID NO: 32718 - protein, 8 aa, Artificial Sequence
  Peptide Derived from Human Papillomavirus
YGSMGVFF

SEQ ID NO: 32719 - protein, 10 aa, Artificial Sequence
  Peptide Derived from Human Papillomavirus
YIPANTTIPF

SEQ ID NO: 32720 - protein, 11 aa, Artificial Sequence
  Peptide Derived from Human Papillomavirus
YIPLGTRPPTA

SEQ ID NO: 32721 - protein, 10 aa, Artificial Sequence
  Peptide Derived from Human Papillomavirus
YLHPSYYMLR

SEQ ID NO: 32722 - protein, 11 aa, Artificial Sequence
  Peptide Derived from Human Papillomavirus
YLHPSYYMLRK

SEQ ID NO: 32723 - protein, 8 aa, Artificial Sequence
  Peptide Derived from Human Papillomavirus
YMLRKRRK

SEQ ID NO: 32724 - protein, 9 aa, Artificial Sequence
  Peptide Derived from Human Papillomavirus
YMLRKRRKR

SEQ ID NO: 32725 - protein, 11 aa, Artificial Sequence
  Peptide Derived from Human Papillomavirus
YSRIGNKQTLR

SEQ ID NO: 32726 - protein, 9 aa, Artificial Sequence
  Peptide Derived from Human Papillomavirus
YSRTTQQVK

SEQ ID NO: 32727 - protein, 10 aa, Artificial Sequence
  Peptide Derived from Human Papillomavirus
YTIIADAGDF

SEQ ID NO: 32728 - protein, 11 aa, Artificial Sequence
  Peptide Derived from Human Papillomavirus
YTIIADAGDFY

SEQ ID NO: 32729 - protein, 8 aa, Artificial Sequence
  Peptide Derived from Human Papillomavirus
YTTTSHAA

SEQ ID NO: 32730 - protein, 11 aa, Artificial Sequence
  Peptide Derived from Human Papillomavirus
AAAFLKSNCQA

SEQ ID NO: 32731 - protein, 10 aa, Artificial Sequence
  Peptide Derived from Human Papillomavirus
AAFLKSNCQA

SEQ ID NO: 32732 - protein, 11 aa, Artificial Sequence
  Peptide Derived from Human Papillomavirus
AAFLKSNCQAK

SEQ ID NO: 32733 - protein, 8 aa, Artificial Sequence
  Peptide Derived from Human Papillomavirus
ADSNSNAA

SEQ ID NO: 32734 - protein, 9 aa, Artificial Sequence
  Peptide Derived from Human Papillomavirus
ADSNSNAAA

SEQ ID NO: 32735 - protein, 10 aa, Artificial Sequence
  Peptide Derived from Human Papillomavirus
ADSNSNAAAF

SEQ ID NO: 32736 - protein, 8 aa, Artificial Sequence
  Peptide Derived from Human Papillomavirus
ADTEGNPF

SEQ ID NO: 32737 - protein, 11 aa, Artificial Sequence
  Peptide Derived from Human Papillomavirus
ADTEGNPFGTF

SEQ ID NO: 32738 - protein, 8 aa, Artificial Sequence
  Peptide Derived from Human Papillomavirus
AFEYALLA

SEQ ID NO: 32739 - protein, 9 aa, Artificial Sequence
  Peptide Derived from Human Papillomavirus
AFLKSNCQA

SEQ ID NO: 32740 - protein, 10 aa, Artificial Sequence
  Peptide Derived from Human Papillomavirus
AFLKSNCQAK

SEQ ID NO: 32741 - protein, 11 aa, Artificial Sequence
  Peptide Derived from Human Papillomavirus
AFLKSNCQAKY

SEQ ID NO: 32742 - protein, 10 aa, Artificial Sequence
  Peptide Derived from Human Papillomavirus
AIFGVNPTIA

SEQ ID NO: 32743 - protein, 11 aa, Artificial Sequence
  Peptide Derived from Human Papillomavirus
ALDGNPISIDR

SEQ ID NO: 32744 - protein, 9 aa, Artificial Sequence
  Peptide Derived from Human Papillomavirus
ALFHAQEVH

SEQ ID NO: 32745 - protein, 11 aa, Artificial Sequence
  Peptide Derived from Human Papillomavirus
ALKSFLKGTPK

SEQ ID NO: 32746 - protein, 10 aa, Artificial Sequence
  Peptide Derived from Human Papillomavirus
ALLADSNSNA

SEQ ID NO: 32747 - protein, 11 aa, Artificial Sequence
  Peptide Derived from Human Papillomavirus
ALLADSNSNAA

SEQ ID NO: 32748 - protein, 9 aa, Artificial Sequence
  Peptide Derived from Human Papillomavirus
ALLRYKCGK

SEQ ID NO: 32749 - protein, 11 aa, Artificial Sequence
  Peptide Derived from Human Papillomavirus
ALLRYKCGKSR

SEQ ID NO: 32750 - protein, 10 aa, Artificial Sequence
  Peptide Derived from Human Papillomavirus
AMLAVFKDTY

SEQ ID NO: 32751 - protein, 11 aa, Artificial Sequence
  Peptide Derived from Human Papillomavirus
ATDTGSDMVDF

SEQ ID NO: 32752 - protein, 8 aa, Artificial Sequence
  Peptide Derived from Human Papillomavirus
ATMCKHYR

SEQ ID NO: 32753 - protein, 9 aa, Artificial Sequence
  Peptide Derived from Human Papillomavirus
ATMCKHYRR

SEQ ID NO: 32754 - protein, 10 aa, Artificial Sequence
  Peptide Derived from Human Papillomavirus
ATMCKHYRRA

SEQ ID NO: 32755 - protein, 8 aa, Artificial Sequence
  Peptide Derived from Human Papillomavirus
ATTTCWTY

SEQ ID NO: 32756 - protein, 9 aa, Artificial Sequence
  Peptide Derived from Human Papillomavirus
ATTTCWTYF

SEQ ID NO: 32757 - protein, 11 aa, Artificial Sequence
  Peptide Derived from Human Papillomavirus
AVFKDTYGLSF

SEQ ID NO: 32758 - protein, 11 aa, Artificial Sequence
  Peptide Derived from Human Papillomavirus
AVISFVNSTSH

SEQ ID NO: 32759 - protein, 8 aa, Artificial Sequence
  Peptide Derived from Human Papillomavirus
CATMCKHY

SEQ ID NO: 32760 - protein, 9 aa, Artificial Sequence
  Peptide Derived from Human Papillomavirus
CATMCKHYR

SEQ ID NO: 32761 - protein, 10 aa, Artificial Sequence
  Peptide Derived from Human Papillomavirus
CATMCKHYRR

SEQ ID NO: 32762 - protein, 11 aa, Artificial Sequence
  Peptide Derived from Human Papillomavirus
CATMCKHYRRA

SEQ ID NO: 32763 - protein, 9 aa, Artificial Sequence
  Peptide Derived from Human Papillomavirus
CFFERTWSR

SEQ ID NO: 32764 - protein, 9 aa, Artificial Sequence
  Peptide Derived from Human Papillomavirus
CGKSRLTVA

SEQ ID NO: 32765 - protein, 10 aa, Artificial Sequence
  Peptide Derived from Human Papillomavirus
CGKSRLTVAK

SEQ ID NO: 32766 - protein, 8 aa, Artificial Sequence
  Peptide Derived from Human Papillomavirus
CGPANTGK

SEQ ID NO: 32767 - protein, 10 aa, Artificial Sequence
  Peptide Derived from Human Papillomavirus
CGPANTGKSY

SEQ ID NO: 32768 - protein, 11 aa, Artificial Sequence
  Peptide Derived from Human Papillomavirus
CGPANTGKSYF

SEQ ID NO: 32769 - protein, 8 aa, Artificial Sequence
  Peptide Derived from Human Papillomavirus
CLVFCGPA

SEQ ID NO: 32770 - protein, 8 aa, Artificial Sequence
  Peptide Derived from Human Papillomavirus
CMLIQPPK

SEQ ID NO: 32771 - protein, 10 aa, Artificial Sequence
  Peptide Derived from Human Papillomavirus
CMLIQPPKLR

SEQ ID NO: 32772 - protein, 8 aa, Artificial Sequence
  Peptide Derived from Human Papillomavirus
CSGGSTEA

SEQ ID NO: 32773 - protein, 11 aa, Artificial Sequence
  Peptide Derived from Human Papillomavirus
CSKIDEGGDWR

SEQ ID NO: 32774 - protein, 9 aa, Artificial Sequence
  Peptide Derived from Human Papillomavirus
CTDWVTAIF

SEQ ID NO: 32775 - protein, 11 aa, Artificial Sequence
  Peptide Derived from Human Papillomavirus
CTIAQLKDLLK

SEQ ID NO: 32776 - protein, 9 aa, Artificial Sequence
  Peptide Derived from Human Papillomavirus
DADTEGNPF

SEQ ID NO: 32777 - protein, 9 aa, Artificial Sequence
  Peptide Derived from Human Papillomavirus
DAQVLHVLK

SEQ ID NO: 32778 - protein, 10 aa, Artificial Sequence
  Peptide Derived from Human Papillomavirus
DAQVLHVLKR

SEQ ID NO: 32779 - protein, 11 aa, Artificial Sequence
  Peptide Derived from Human Papillomavirus
DAQVLHVLKRK

SEQ ID NO: 32780 - protein, 9 aa, Artificial Sequence
  Peptide Derived from Human Papillomavirus
DATTTCWTY

SEQ ID NO: 32781 - protein, 10 aa, Artificial Sequence
  Peptide Derived from Human Papillomavirus
DATTTCWTYF

SEQ ID NO: 32782 - protein, 8 aa, Artificial Sequence
  Peptide Derived from Human Papillomavirus
DCATMCKH

SEQ ID NO: 32783 - protein, 9 aa, Artificial Sequence
  Peptide Derived from Human Papillomavirus
DCATMCKHY

SEQ ID NO: 32784 - protein, 10 aa, Artificial Sequence
  Peptide Derived from Human Papillomavirus
DCATMCKHYR

SEQ ID NO: 32785 - protein, 11 aa, Artificial Sequence
  Peptide Derived from Human Papillomavirus
DCATMCKHYRR

SEQ ID NO: 32786 - protein, 10 aa, Artificial Sequence
  Peptide Derived from Human Papillomavirus
DCKWGVLILA

SEQ ID NO: 32787 - protein, 10 aa, Artificial Sequence
  Peptide Derived from Human Papillomavirus
DDATTTCWTY

SEQ ID NO: 32788 - protein, 11 aa, Artificial Sequence
  Peptide Derived from Human Papillomavirus
DDATTTCWTYF

SEQ ID NO: 32789 - protein, 9 aa, Artificial Sequence
  Peptide Derived from Human Papillomavirus
DFIDTQGTF

SEQ ID NO: 32790 - protein, 11 aa, Artificial Sequence
  Peptide Derived from Human Papillomavirus
DGEGTGCNGWF

SEQ ID NO: 32791 - protein, 9 aa, Artificial Sequence
  Peptide Derived from Human Papillomavirus
DGNPISIDR

SEQ ID NO: 32792 - protein, 10 aa, Artificial Sequence
  Peptide Derived from Human Papillomavirus
DGNPISIDRK

SEQ ID NO: 32793 - protein, 11 aa, Artificial Sequence
  Peptide Derived from Human Papillomavirus
DGNPISIDRKH

SEQ ID NO: 32794 - protein, 9 aa, Artificial Sequence
  Peptide Derived from Human Papillomavirus
DLHEEEEDA

SEQ ID NO: 32795 - protein, 8 aa, Artificial Sequence
  Peptide Derived from Human Papillomavirus
DLLKVNNK

SEQ ID NO: 32796 - protein, 11 aa, Artificial Sequence
  Peptide Derived from Human Papillomavirus
DLLKVNNKQGA

SEQ ID NO: 32797 - protein, 9 aa, Artificial Sequence
  Peptide Derived from Human Papillomavirus
DLSEMVQWA

SEQ ID NO: 32798 - protein, 10 aa, Artificial Sequence
  Peptide Derived from Human Papillomavirus
DLSEMVQWAF

SEQ ID NO: 32799 - protein, 10 aa, Artificial Sequence
  Peptide Derived from Human Papillomavirus
DLVRNFKSDK

SEQ ID NO: 32800 - protein, 10 aa, Artificial Sequence
  Peptide Derived from Human Papillomavirus
DMAFEYALLA

SEQ ID NO: 32801 - protein, 11 aa, Artificial Sequence
  Peptide Derived from Human Papillomavirus
DSGYGCSEVEA

SEQ ID NO: 32802 - protein, 8 aa, Artificial Sequence
  Peptide Derived from Human Papillomavirus
DSNSNAAA

SEQ ID NO: 32803 - protein, 9 aa, Artificial Sequence
  Peptide Derived from Human Papillomavirus
DSNSNAAAF

SEQ ID NO: 32804 - protein, 11 aa, Artificial Sequence
  Peptide Derived from Human Papillomavirus
DSNSNAAAFLK

SEQ ID NO: 32805 - protein, 10 aa, Artificial Sequence
  Peptide Derived from Human Papillomavirus
DTEGNPFGTF

SEQ ID NO: 32806 - protein, 11 aa, Artificial Sequence
  Peptide Derived from Human Papillomavirus
DTEGNPFGTFK

SEQ ID NO: 32807 - protein, 9 aa, Artificial Sequence
  Peptide Derived from Human Papillomavirus
DTGSDMVDF

SEQ ID NO: 32808 - protein, 10 aa, Artificial Sequence
  Peptide Derived from Human Papillomavirus
DTKVAMLDDA

SEQ ID NO: 32809 - protein, 8 aa, Artificial Sequence
  Peptide Derived from Human Papillomavirus
DTPEWIQR

SEQ ID NO: 32810 - protein, 10 aa, Artificial Sequence
  Peptide Derived from Human Papillomavirus
DTQGTFCEQA

SEQ ID NO: 32811 - protein, 11 aa, Artificial Sequence
  Peptide Derived from Human Papillomavirus
DVISDDEDENA

SEQ ID NO: 32812 - protein, 10 aa, Artificial Sequence
  Peptide Derived from Human Papillomavirus
EDADTEGNPF

SEQ ID NO: 32813 - protein, 8 aa, Artificial Sequence
  Peptide Derived from Human Papillomavirus
EFITFLGA

SEQ ID NO: 32814 - protein, 10 aa, Artificial Sequence
  Peptide Derived from Human Papillomavirus
EFITFLGALK

SEQ ID NO: 32815 - protein, 8 aa, Artificial Sequence
  Peptide Derived from Human Papillomavirus
EFPNAFPF

SEQ ID NO: 32816 - protein, 10 aa, Artificial Sequence
  Peptide Derived from Human Papillomavirus
EFPNAFPFDK

SEQ ID NO: 32817 - protein, 10 aa, Artificial Sequence
  Peptide Derived from Human Papillomavirus
EGFKTLIQPF

SEQ ID NO: 32818 - protein, 11 aa, Artificial Sequence
  Peptide Derived from Human Papillomavirus
EGGDWRPIVQF

SEQ ID NO: 32819 - protein, 8 aa, Artificial Sequence
  Peptide Derived from Human Papillomavirus
EGNPFGTF

SEQ ID NO: 32820 - protein, 9 aa, Artificial Sequence
  Peptide Derived from Human Papillomavirus
EGNPFGTFK

SEQ ID NO: 32821 - protein, 11 aa, Artificial Sequence
  Peptide Derived from Human Papillomavirus
EGNPFGTFKLR

SEQ ID NO: 32822 - protein, 9 aa, Artificial Sequence
  Peptide Derived from Human Papillomavirus
EGTGCNGWF

SEQ ID NO: 32823 - protein, 10 aa, Artificial Sequence
  Peptide Derived from Human Papillomavirus
EGTGCNGWFY

SEQ ID NO: 32824 - protein, 8 aa, Artificial Sequence
  Peptide Derived from Human Papillomavirus
EINDKNWK

SEQ ID NO: 32825 - protein, 10 aa, Artificial Sequence
  Peptide Derived from Human Papillomavirus
EINDKNWKCF

SEQ ID NO: 32826 - protein, 11 aa, Artificial Sequence
  Peptide Derived from Human Papillomavirus
EINDKNWKCFF

SEQ ID NO: 32827 - protein, 9 aa, Artificial Sequence
  Peptide Derived from Human Papillomavirus
EISLNSGQK

SEQ ID NO: 32828 - protein, 10 aa, Artificial Sequence
  Peptide Derived from Human Papillomavirus
EISLNSGQKK

SEQ ID NO: 32829 - protein, 11 aa, Artificial Sequence
  Peptide Derived from Human Papillomavirus
EISLNSGQKKA

SEQ ID NO: 32830 - protein, 9 aa, Artificial Sequence
  Peptide Derived from Human Papillomavirus
ELETAQALF

SEQ ID NO: 32831 - protein, 10 aa, Artificial Sequence
  Peptide Derived from Human Papillomavirus
ELETAQALFH

SEQ ID NO: 32832 - protein, 11 aa, Artificial Sequence
  Peptide Derived from Human Papillomavirus
ELETAQALFHA

SEQ ID NO: 32833 - protein, 9 aa, Artificial Sequence
  Peptide Derived from Human Papillomavirus
ELTDESDMA

SEQ ID NO: 32834 - protein, 10 aa, Artificial Sequence
  Peptide Derived from Human Papillomavirus
ELTDESDMAF

SEQ ID NO: 32835 - protein, 8 aa, Artificial Sequence
  Peptide Derived from Human Papillomavirus
ESDMAFEY

SEQ ID NO: 32836 - protein, 9 aa, Artificial Sequence
  Peptide Derived from Human Papillomavirus
ESDMAFEYA

SEQ ID NO: 32837 - protein, 9 aa, Artificial Sequence
  Peptide Derived from Human Papillomavirus
ESRITVFEF

SEQ ID NO: 32838 - protein, 8 aa, Artificial Sequence
  Peptide Derived from Human Papillomavirus
ETAQALFH

SEQ ID NO: 32839 - protein, 9 aa, Artificial Sequence
  Peptide Derived from Human Papillomavirus
ETAQALFHA

SEQ ID NO: 32840 - protein, 10 aa, Artificial Sequence
  Peptide Derived from Human Papillomavirus
ETCMLIQPPK

SEQ ID NO: 32841 - protein, 9 aa, Artificial Sequence
  Peptide Derived from Human Papillomavirus
EVDTELSPR

SEQ ID NO: 32842 - protein, 10 aa, Artificial Sequence
  Peptide Derived from Human Papillomavirus
EVHNDAQVLH

SEQ ID NO: 32843 - protein, 10 aa, Artificial Sequence
  Peptide Derived from Human Papillomavirus
FCEQAELETA

SEQ ID NO: 32844 - protein, 9 aa, Artificial Sequence
  Peptide Derived from Human Papillomavirus
FCGPANTGK

SEQ ID NO: 32845 - protein, 11 aa, Artificial Sequence
  Peptide Derived from Human Papillomavirus
FCGPANTGKSY

SEQ ID NO: 32846 - protein, 9 aa, Artificial Sequence
  Peptide Derived from Human Papillomavirus
FDKNGNPVY

SEQ ID NO: 32847 - protein, 10 aa, Artificial Sequence
  Peptide Derived from Human Papillomavirus
FDLSEMVQWA

SEQ ID NO: 32848 - protein, 11 aa, Artificial Sequence
  Peptide Derived from Human Papillomavirus
FDLSEMVQWAF

SEQ ID NO: 32849 - protein, 8 aa, Artificial Sequence
  Peptide Derived from Human Papillomavirus
FDTYMRNA

SEQ ID NO: 32850 - protein, 8 aa, Artificial Sequence
  Peptide Derived from Human Papillomavirus
FFERTWSR

SEQ ID NO: 32851 - protein, 8 aa, Artificial Sequence
  Peptide Derived from Human Papillomavirus
FGMSFIHF

SEQ ID NO: 32852 - protein, 8 aa, Artificial Sequence
  Peptide Derived from Human Papillomavirus
FGTFKLRA

SEQ ID NO: 32853 - protein, 8 aa, Artificial Sequence
  Peptide Derived from Human Papillomavirus
FGVNPTIA

SEQ ID NO: 32854 - protein, 11 aa, Artificial Sequence
  Peptide Derived from Human Papillomavirus
FGVNPTIAEGF

SEQ ID NO: 32855 - protein, 8 aa, Artificial Sequence
  Peptide Derived from Human Papillomavirus
FIDTQGTF

SEQ ID NO: 32856 - protein, 8 aa, Artificial Sequence
  Peptide Derived from Human Papillomavirus
FIHFIQGA

SEQ ID NO: 32857 - protein, 9 aa, Artificial Sequence
  Peptide Derived from Human Papillomavirus
FIQGAVISF

SEQ ID NO: 32858 - protein, 9 aa, Artificial Sequence
  Peptide Derived from Human Papillomavirus
FITFLGALK

SEQ ID NO: 32859 - protein, 11 aa, Artificial Sequence
  Peptide Derived from Human Papillomavirus
FITFLGALKSF

SEQ ID NO: 32860 - protein, 8 aa, Artificial Sequence
  Peptide Derived from Human Papillomavirus
FLGALKSF

SEQ ID NO: 32861 - protein, 10 aa, Artificial Sequence
  Peptide Derived from Human Papillomavirus
FLGALKSFLK

SEQ ID NO: 32862 - protein, 8 aa, Artificial Sequence
  Peptide Derived from Human Papillomavirus
FLKGTPKK

SEQ ID NO: 32863 - protein, 8 aa, Artificial Sequence
  Peptide Derived from Human Papillomavirus
FLKSNCQA

SEQ ID NO: 32864 - protein, 9 aa, Artificial Sequence
  Peptide Derived from Human Papillomavirus
FLKSNCQAK

SEQ ID NO: 32865 - protein, 10 aa, Artificial Sequence
  Peptide Derived from Human Papillomavirus
FLKSNCQAKY

SEQ ID NO: 32866 - protein, 9 aa, Artificial Sequence
  Peptide Derived from Human Papillomavirus
FLRYQQIEF

SEQ ID NO: 32867 - protein, 8 aa, Artificial Sequence
  Peptide Derived from Human Papillomavirus
FTDLVRNF

SEQ ID NO: 32868 - protein, 9 aa, Artificial Sequence
  Peptide Derived from Human Papillomavirus
FTDLVRNFK

SEQ ID NO: 32869 - protein, 8 aa, Artificial Sequence
  Peptide Derived from Human Papillomavirus
FTISDSGY

SEQ ID NO: 32870 - protein, 8 aa, Artificial Sequence
  Peptide Derived from Human Papillomavirus
FVNSTSHF

SEQ ID NO: 32871 - protein, 8 aa, Artificial Sequence
  Peptide Derived from Human Papillomavirus
GALKSFLK

SEQ ID NO: 32872 - protein, 8 aa, Artificial Sequence
  Peptide Derived from Human Papillomavirus
GAMLAVFK

SEQ ID NO: 32873 - protein, 11 aa, Artificial Sequence
  Peptide Derived from Human Papillomavirus
GAMLAVFKDTY

SEQ ID NO: 32874 - protein, 10 aa, Artificial Sequence
  Peptide Derived from Human Papillomavirus
GCNGWFYVQA

SEQ ID NO: 32875 - protein, 9 aa, Artificial Sequence
  Peptide Derived from Human Papillomavirus
GDTPEWIQR

SEQ ID NO: 32876 - protein, 9 aa, Artificial Sequence
  Peptide Derived from Human Papillomavirus
GDWRPIVQF

SEQ ID NO: 32877 - protein, 11 aa, Artificial Sequence
  Peptide Derived from Human Papillomavirus
GDWRPIVQFLR

SEQ ID NO: 32878 - protein, 9 aa, Artificial Sequence
  Peptide Derived from Human Papillomavirus
GFKTLIQPF

SEQ ID NO: 32879 - protein, 10 aa, Artificial Sequence
  Peptide Derived from Human Papillomavirus
GGDWRPIVQF

SEQ ID NO: 32880 - protein, 9 aa, Artificial Sequence
  Peptide Derived from Human Papillomavirus
GLSFTDLVR

SEQ ID NO: 32881 - protein, 11 aa, Artificial Sequence
  Peptide Derived from Human Papillomavirus
GLSFTDLVRNF

SEQ ID NO: 32882 - protein, 11 aa, Artificial Sequence
  Peptide Derived from Human Papillomavirus
GMSFIHFIQGA

SEQ ID NO: 32883 - protein, 11 aa, Artificial Sequence
  Peptide Derived from Human Papillomavirus
GSTENSPLGER

SEQ ID NO: 32884 - protein, 11 aa, Artificial Sequence
  Peptide Derived from Human Papillomavirus
GTFKLRAGQNH

SEQ ID NO: 32885 - protein, 8 aa, Artificial Sequence
  Peptide Derived from Human Papillomavirus
GTGCNGWF

SEQ ID NO: 32886 - protein, 9 aa, Artificial Sequence
  Peptide Derived from Human Papillomavirus
GTGCNGWFY

SEQ ID NO: 32887 - protein, 10 aa, Artificial Sequence
  Peptide Derived from Human Papillomavirus
GTPKKNCLVF

SEQ ID NO: 32888 - protein, 9 aa, Artificial Sequence
  Peptide Derived from Human Papillomavirus
GVLILALLR

SEQ ID NO: 32889 - protein, 10 aa, Artificial Sequence
  Peptide Derived from Human Papillomavirus
GVLILALLRY

SEQ ID NO: 32890 - protein, 11 aa, Artificial Sequence
  Peptide Derived from Human Papillomavirus
GVLILALLRYK

SEQ ID NO: 32891 - protein, 10 aa, Artificial Sequence
  Peptide Derived from Human Papillomavirus
GVNPTIAEGF

SEQ ID NO: 32892 - protein, 11 aa, Artificial Sequence
  Peptide Derived from Human Papillomavirus
GVNPTIAEGFK

SEQ ID NO: 32893 - protein, 9 aa, Artificial Sequence
  Peptide Derived from Human Papillomavirus
HAQEVHNDA

SEQ ID NO: 32894 - protein, 10 aa, Artificial Sequence
  Peptide Derived from Human Papillomavirus
HFIQGAVISF

SEQ ID NO: 32895 - protein, 11 aa, Artificial Sequence
  Peptide Derived from Human Papillomavirus
HFWLEPLTDTK

SEQ ID NO: 32896 - protein, 8 aa, Artificial Sequence
  Peptide Derived from Human Papillomavirus
HGIDDSNF

SEQ ID NO: 32897 - protein, 8 aa, Artificial Sequence
  Peptide Derived from Human Papillomavirus
HIQCLDCK

SEQ ID NO: 32898 - protein, 8 aa, Artificial Sequence
  Peptide Derived from Human Papillomavirus
HVLKRKFA

SEQ ID NO: 32899 - protein, 9 aa, Artificial Sequence
  Peptide Derived from Human Papillomavirus
IAQLKDLLK

SEQ ID NO: 32900 - protein, 8 aa, Artificial Sequence
  Peptide Derived from Human Papillomavirus
IDEGGDWR

SEQ ID NO: 32901 - protein, 11 aa, Artificial Sequence
  Peptide Derived from Human Papillomavirus
IDTQGTFCEQA

SEQ ID NO: 32902 - protein, 9 aa, Artificial Sequence
  Peptide Derived from Human Papillomavirus
IFGVNPTIA

SEQ ID NO: 32903 - protein, 11 aa, Artificial Sequence
  Peptide Derived from Human Papillomavirus
IIQHGIDDSNF

SEQ ID NO: 32904 - protein, 8 aa, Artificial Sequence
  Peptide Derived from Human Papillomavirus
ILALLRYK

SEQ ID NO: 32905 - protein, 11 aa, Artificial Sequence
  Peptide Derived from Human Papillomavirus
ILALLRYKCGK

SEQ ID NO: 32906 - protein, 8 aa, Artificial Sequence
  Peptide Derived from Human Papillomavirus
ILLTTNIH

SEQ ID NO: 32907 - protein, 10 aa, Artificial Sequence
  Peptide Derived from Human Papillomavirus
ILLTTNIHPA

SEQ ID NO: 32908 - protein, 11 aa, Artificial Sequence
  Peptide Derived from Human Papillomavirus
ILLTTNIHPAK

SEQ ID NO: 32909 - protein, 9 aa, Artificial Sequence
  Peptide Derived from Human Papillomavirus
ISDDEDENA

SEQ ID NO: 32910 - protein, 9 aa, Artificial Sequence
  Peptide Derived from Human Papillomavirus
ISFVNSTSH

SEQ ID NO: 32911 - protein, 10 aa, Artificial Sequence
  Peptide Derived from Human Papillomavirus
ISFVNSTSHF

SEQ ID NO: 32912 - protein, 8 aa, Artificial Sequence
  Peptide Derived from Human Papillomavirus
ISIDRKHK

SEQ ID NO: 32913 - protein, 8 aa, Artificial Sequence
  Peptide Derived from Human Papillomavirus
ISLNSGQK

SEQ ID NO: 32914 - protein, 9 aa, Artificial Sequence
  Peptide Derived from Human Papillomavirus
ISLNSGQKK

SEQ ID NO: 32915 - protein, 10 aa, Artificial Sequence
  Peptide Derived from Human Papillomavirus
ISLNSGQKKA

SEQ ID NO: 32916 - protein, 11 aa, Artificial Sequence
  Peptide Derived from Human Papillomavirus
ISLNSGQKKAK

SEQ ID NO: 32917 - protein, 8 aa, Artificial Sequence
  Peptide Derived from Human Papillomavirus
ITFLGALK

SEQ ID NO: 32918 - protein, 10 aa, Artificial Sequence
  Peptide Derived from Human Papillomavirus
ITFLGALKSF

SEQ ID NO: 32919 - protein, 9 aa, Artificial Sequence
  Peptide Derived from Human Papillomavirus
ITVFEFPNA

SEQ ID NO: 32920 - protein, 10 aa, Artificial Sequence
  Peptide Derived from Human Papillomavirus
ITVFEFPNAF

SEQ ID NO: 32921 - protein, 10 aa, Artificial Sequence
  Peptide Derived from Human Papillomavirus
KCFFERTWSR

SEQ ID NO: 32922 - protein, 10 aa, Artificial Sequence
  Peptide Derived from Human Papillomavirus
KCGKSRLTVA

SEQ ID NO: 32923 - protein, 11 aa, Artificial Sequence
  Peptide Derived from Human Papillomavirus
KCGKSRLTVAK

SEQ ID NO: 32924 - protein, 8 aa, Artificial Sequence
  Peptide Derived from Human Papillomavirus
KDCATMCK

SEQ ID NO: 32925 - protein, 9 aa, Artificial Sequence
  Peptide Derived from Human Papillomavirus
KDCATMCKH

SEQ ID NO: 32926 - protein, 10 aa, Artificial Sequence
  Peptide Derived from Human Papillomavirus
KDCATMCKHY

SEQ ID NO: 32927 - protein, 11 aa, Artificial Sequence
  Peptide Derived from Human Papillomavirus
KDCATMCKHYR

SEQ ID NO: 32928 - protein, 9 aa, Artificial Sequence
  Peptide Derived from Human Papillomavirus
KDLLKVNNK

SEQ ID NO: 32929 - protein, 11 aa, Artificial Sequence
  Peptide Derived from Human Papillomavirus
KDNRWPYLESR

SEQ ID NO: 32930 - protein, 8 aa, Artificial Sequence
  Peptide Derived from Human Papillomavirus
KDTYGLSF

SEQ ID NO: 32931 - protein, 8 aa, Artificial Sequence
  Peptide Derived from Human Papillomavirus
KGLSTLLH

SEQ ID NO: 32932 - protein, 11 aa, Artificial Sequence
  Peptide Derived from Human Papillomavirus
KGTPKKNCLVF

SEQ ID NO: 32933 - protein, 9 aa, Artificial Sequence
  Peptide Derived from Human Papillomavirus
KIDEGGDWR

SEQ ID NO: 32934 - protein, 8 aa, Artificial Sequence
  Peptide Derived from Human Papillomavirus
KLRAGQNH

SEQ ID NO: 32935 - protein, 9 aa, Artificial Sequence
  Peptide Derived from Human Papillomavirus
KLRAGQNHR

SEQ ID NO: 32936 - protein, 8 aa, Artificial Sequence
  Peptide Derived from Human Papillomavirus
KLRSSVAA

SEQ ID NO: 32937 - protein, 10 aa, Artificial Sequence
  Peptide Derived from Human Papillomavirus
KLRSSVAALY

SEQ ID NO: 32938 - protein, 9 aa, Artificial Sequence
  Peptide Derived from Human Papillomavirus
KSFLKGTPK

SEQ ID NO: 32939 - protein, 10 aa, Artificial Sequence
  Peptide Derived from Human Papillomavirus
KSFLKGTPKK

SEQ ID NO: 32940 - protein, 8 aa, Artificial Sequence
  Peptide Derived from Human Papillomavirus
KSNCQAKY

SEQ ID NO: 32941 - protein, 10 aa, Artificial Sequence
  Peptide Derived from Human Papillomavirus
KSNCQAKYLK

SEQ ID NO: 32942 - protein, 8 aa, Artificial Sequence
  Peptide Derived from Human Papillomavirus
KSRLTVAK

SEQ ID NO: 32943 - protein, 8 aa, Artificial Sequence
  Peptide Derived from Human Papillomavirus
KSYFGMSF

SEQ ID NO: 32944 - protein, 10 aa, Artificial Sequence
  Peptide Derived from Human Papillomavirus
KSYFGMSFIH

SEQ ID NO: 32945 - protein, 11 aa, Artificial Sequence
  Peptide Derived from Human Papillomavirus
KSYFGMSFIHF

SEQ ID NO: 32946 - protein, 10 aa, Artificial Sequence
  Peptide Derived from Human Papillomavirus
KTLIQPFILY

SEQ ID NO: 32947 - protein, 11 aa, Artificial Sequence
  Peptide Derived from Human Papillomavirus
KTLIQPFILYA

SEQ ID NO: 32948 - protein, 10 aa, Artificial Sequence
  Peptide Derived from Human Papillomavirus
KTTCTDWVTA

SEQ ID NO: 32949 - protein, 8 aa, Artificial Sequence
  Peptide Derived from Human Papillomavirus
KVAMLDDA

SEQ ID NO: 32950 - protein, 8 aa, Artificial Sequence
  Peptide Derived from Human Papillomavirus
KVNNKQGA

SEQ ID NO: 32951 - protein, 11 aa, Artificial Sequence
  Peptide Derived from Human Papillomavirus
KVNNKQGAMLA

SEQ ID NO: 32952 - protein, 8 aa, Artificial Sequence
  Peptide Derived from Human Papillomavirus
LADSNSNA

SEQ ID NO: 32953 - protein, 9 aa, Artificial Sequence
  Peptide Derived from Human Papillomavirus
LADSNSNAA

SEQ ID NO: 32954 - protein, 10 aa, Artificial Sequence
  Peptide Derived from Human Papillomavirus
LADSNSNAAA

SEQ ID NO: 32955 - protein, 11 aa, Artificial Sequence
  Peptide Derived from Human Papillomavirus
LADSNSNAAAF

SEQ ID NO: 32956 - protein, 10 aa, Artificial Sequence
  Peptide Derived from Human Papillomavirus
LALLRYKCGK

SEQ ID NO: 32957 - protein, 8 aa, Artificial Sequence
  Peptide Derived from Human Papillomavirus
LAVFKDTY

SEQ ID NO: 32958 - protein, 11 aa, Artificial Sequence
  Peptide Derived from Human Papillomavirus
LDCKWGVLILA

SEQ ID NO: 32959 - protein, 11 aa, Artificial Sequence
  Peptide Derived from Human Papillomavirus
LDDATTTCWTY

SEQ ID NO: 32960 - protein, 10 aa, Artificial Sequence
  Peptide Derived from Human Papillomavirus
LDGNPISIDR

SEQ ID NO: 32961 - protein, 11 aa, Artificial Sequence
  Peptide Derived from Human Papillomavirus
LDGNPISIDRK

SEQ ID NO: 32962 - protein, 10 aa, Artificial Sequence
  Peptide Derived from Human Papillomavirus
LDLHEEEEDA

SEQ ID NO: 32963 - protein, 8 aa, Artificial Sequence
  Peptide Derived from Human Papillomavirus
LFHAQEVH

SEQ ID NO: 32964 - protein, 11 aa, Artificial Sequence
  Peptide Derived from Human Papillomavirus
LFHAQEVHNDA

SEQ ID NO: 32965 - protein, 9 aa, Artificial Sequence
  Peptide Derived from Human Papillomavirus
LFTISDSGY

SEQ ID NO: 32966 - protein, 9 aa, Artificial Sequence
  Peptide Derived from Human Papillomavirus
LGALKSFLK

SEQ ID NO: 32967 - protein, 8 aa, Artificial Sequence
  Peptide Derived from Human Papillomavirus
LILALLRY

SEQ ID NO: 32968 - protein, 9 aa, Artificial Sequence
  Peptide Derived from Human Papillomavirus
LILALLRYK

SEQ ID NO: 32969 - protein, 8 aa, Artificial Sequence
  Peptide Derived from Human Papillomavirus
LIQPFILY

SEQ ID NO: 32970 - protein, 9 aa, Artificial Sequence
  Peptide Derived from Human Papillomavirus
LIQPFILYA

SEQ ID NO: 32971 - protein, 10 aa, Artificial Sequence
  Peptide Derived from Human Papillomavirus
LIQPFILYAH

SEQ ID NO: 32972 - protein, 8 aa, Artificial Sequence
  Peptide Derived from Human Papillomavirus
LIQPPKLR

SEQ ID NO: 32973 - protein, 9 aa, Artificial Sequence
  Peptide Derived from Human Papillomavirus
LLADSNSNA

SEQ ID NO: 32974 - protein, 10 aa, Artificial Sequence
  Peptide Derived from Human Papillomavirus
LLADSNSNAA

SEQ ID NO: 32975 - protein, 11 aa, Artificial Sequence
  Peptide Derived from Human Papillomavirus
LLADSNSNAAA

SEQ ID NO: 32976 - protein, 10 aa, Artificial Sequence
  Peptide Derived from Human Papillomavirus
LLKVNNKQGA

SEQ ID NO: 32977 - protein, 8 aa, Artificial Sequence
  Peptide Derived from Human Papillomavirus
LLRYKCGK

SEQ ID NO: 32978 - protein, 10 aa, Artificial Sequence
  Peptide Derived from Human Papillomavirus
LLRYKCGKSR

SEQ ID NO: 32979 - protein, 9 aa, Artificial Sequence
  Peptide Derived from Human Papillomavirus
LLTTNIHPA

SEQ ID NO: 32980 - protein, 10 aa, Artificial Sequence
  Peptide Derived from Human Papillomavirus
LLTTNIHPAK

SEQ ID NO: 32981 - protein, 8 aa, Artificial Sequence
  Peptide Derived from Human Papillomavirus
LSEMVQWA

SEQ ID NO: 32982 - protein, 9 aa, Artificial Sequence
  Peptide Derived from Human Papillomavirus
LSEMVQWAF

SEQ ID NO: 32983 - protein, 8 aa, Artificial Sequence
  Peptide Derived from Human Papillomavirus
LSFTDLVR

SEQ ID NO: 32984 - protein, 10 aa, Artificial Sequence
  Peptide Derived from Human Papillomavirus
LSFTDLVRNF

SEQ ID NO: 32985 - protein, 11 aa, Artificial Sequence
  Peptide Derived from Human Papillomavirus
LSFTDLVRNFK

SEQ ID NO: 32986 - protein, 8 aa, Artificial Sequence
  Peptide Derived from Human Papillomavirus
LTDESDMA

SEQ ID NO: 32987 - protein, 9 aa, Artificial Sequence
  Peptide Derived from Human Papillomavirus
LTDESDMAF

SEQ ID NO: 32988 - protein, 11 aa, Artificial Sequence
  Peptide Derived from Human Papillomavirus
LTDESDMAFEY

SEQ ID NO: 32989 - protein, 8 aa, Artificial Sequence
  Peptide Derived from Human Papillomavirus
LTTNIHPA

SEQ ID NO: 32990 - protein, 9 aa, Artificial Sequence
  Peptide Derived from Human Papillomavirus
LTTNIHPAK

SEQ ID NO: 32991 - protein, 11 aa, Artificial Sequence
  Peptide Derived from Human Papillomavirus
LVFCGPANTGK

SEQ ID NO: 32992 - protein, 9 aa, Artificial Sequence
  Peptide Derived from Human Papillomavirus
LVRNFKSDK

SEQ ID NO: 32993 - protein, 9 aa, Artificial Sequence
  Peptide Derived from Human Papillomavirus
MAFEYALLA

SEQ ID NO: 32994 - protein, 8 aa, Artificial Sequence
  Peptide Derived from Human Papillomavirus
MCKHYRRA

SEQ ID NO: 32995 - protein, 10 aa, Artificial Sequence
  Peptide Derived from Human Papillomavirus
MCKHYRRAQK

SEQ ID NO: 32996 - protein, 11 aa, Artificial Sequence
  Peptide Derived from Human Papillomavirus
MCKHYRRAQKR

SEQ ID NO: 32997 - protein, 10 aa, Artificial Sequence
  Peptide Derived from Human Papillomavirus
MGDTPEWIQR

SEQ ID NO: 32998 - protein, 9 aa, Artificial Sequence
  Peptide Derived from Human Papillomavirus
MLAVFKDTY

SEQ ID NO: 32999 - protein, 9 aa, Artificial Sequence
  Peptide Derived from Human Papillomavirus
MLIQPPKLR

SEQ ID NO: 33000 - protein, 10 aa, Artificial Sequence
  Peptide Derived from Human Papillomavirus
MSFIHFIQGA

SEQ ID NO: 33001 - protein, 8 aa, Artificial Sequence
  Peptide Derived from Human Papillomavirus
MSQWIRFR

SEQ ID NO: 33002 - protein, 11 aa, Artificial Sequence
  Peptide Derived from Human Papillomavirus
MSQWIRFRCSK

SEQ ID NO: 33003 - protein, 11 aa, Artificial Sequence
  Peptide Derived from Human Papillomavirus
MVDFIDTQGTF

SEQ ID NO: 33004 - protein, 9 aa, Artificial Sequence
  Peptide Derived from Human Papillomavirus
NCLVFCGPA

SEQ ID NO: 33005 - protein, 8 aa, Artificial Sequence
  Peptide Derived from Human Papillomavirus
NCQAKYLK

SEQ ID NO: 33006 - protein, 11 aa, Artificial Sequence
  Peptide Derived from Human Papillomavirus
NCQAKYLKDCA

SEQ ID NO: 33007 - protein, 10 aa, Artificial Sequence
  Peptide Derived from Human Papillomavirus
NDAQVLHVLK

SEQ ID NO: 33008 - protein, 11 aa, Artificial Sequence
  Peptide Derived from Human Papillomavirus
NDAQVLHVLKR

SEQ ID NO: 33009 - protein, 8 aa, Artificial Sequence
  Peptide Derived from Human Papillomavirus
NDKNWKCF

SEQ ID NO: 33010 - protein, 9 aa, Artificial Sequence
  Peptide Derived from Human Papillomavirus
NDKNWKCFF

SEQ ID NO: 33011 - protein, 11 aa, Artificial Sequence
  Peptide Derived from Human Papillomavirus
NDKNWKCFFER

SEQ ID NO: 33012 - protein, 11 aa, Artificial Sequence
  Peptide Derived from Human Papillomavirus
NFDLSEMVQWA

SEQ ID NO: 33013 - protein, 11 aa, Artificial Sequence
  Peptide Derived from Human Papillomavirus
NGNPVYEINDK

SEQ ID NO: 33014 - protein, 8 aa, Artificial Sequence
  Peptide Derived from Human Papillomavirus
NGWFYVQA

SEQ ID NO: 33015 - protein, 9 aa, Artificial Sequence
  Peptide Derived from Human Papillomavirus
NIHPAKDNR

SEQ ID NO: 33016 - protein, 8 aa, Artificial Sequence
  Peptide Derived from Human Papillomavirus
NMSQWIRF

SEQ ID NO: 33017 - protein, 9 aa, Artificial Sequence
  Peptide Derived from Human Papillomavirus
NMSQWIRFR

SEQ ID NO: 33018 - protein, 8 aa, Artificial Sequence
  Peptide Derived from Human Papillomavirus
NSGQKKAK

SEQ ID NO: 33019 - protein, 9 aa, Artificial Sequence
  Peptide Derived from Human Papillomavirus
NSGQKKAKR

SEQ ID NO: 33020 - protein, 10 aa, Artificial Sequence
  Peptide Derived from Human Papillomavirus
NSGQKKAKRR

SEQ ID NO: 33021 - protein, 9 aa, Artificial Sequence
  Peptide Derived from Human Papillomavirus
NSNAAAFLK

SEQ ID NO: 33022 - protein, 11 aa, Artificial Sequence
  Peptide Derived from Human Papillomavirus
NTGKSYFGMSF

SEQ ID NO: 33023 - protein, 10 aa, Artificial Sequence
  Peptide Derived from Human Papillomavirus
NVCSGGSTEA

SEQ ID NO: 33024 - protein, 9 aa, Artificial Sequence
  Peptide Derived from Human Papillomavirus
NVNPQCTIA

SEQ ID NO: 33025 - protein, 9 aa, Artificial Sequence
  Peptide Derived from Human Papillomavirus
PAKDNRWPY

SEQ ID NO: 33026 - protein, 8 aa, Artificial Sequence
  Peptide Derived from Human Papillomavirus
PANTGKSY

SEQ ID NO: 33027 - protein, 9 aa, Artificial Sequence
  Peptide Derived from Human Papillomavirus
PANTGKSYF

SEQ ID NO: 33028 - protein, 10 aa, Artificial Sequence
  Peptide Derived from Human Papillomavirus
PFDKNGNPVY

SEQ ID NO: 33029 - protein, 8 aa, Artificial Sequence
  Peptide Derived from Human Papillomavirus
PFGTFKLR

SEQ ID NO: 33030 - protein, 9 aa, Artificial Sequence
  Peptide Derived from Human Papillomavirus
PFGTFKLRA

SEQ ID NO: 33031 - protein, 9 aa, Artificial Sequence
  Peptide Derived from Human Papillomavirus
PILLTTNIH

SEQ ID NO: 33032 - protein, 11 aa, Artificial Sequence
  Peptide Derived from Human Papillomavirus
PILLTTNIHPA

SEQ ID NO: 33033 - protein, 8 aa, Artificial Sequence
  Peptide Derived from Human Papillomavirus
PISIDRKH

SEQ ID NO: 33034 - protein, 9 aa, Artificial Sequence
  Peptide Derived from Human Papillomavirus
PISIDRKHK

SEQ ID NO: 33035 - protein, 8 aa, Artificial Sequence
  Peptide Derived from Human Papillomavirus
PIVQFLRY

SEQ ID NO: 33036 - protein, 8 aa, Artificial Sequence
  Peptide Derived from Human Papillomavirus
PLTDTKVA

SEQ ID NO: 33037 - protein, 8 aa, Artificial Sequence
  Peptide Derived from Human Papillomavirus
PTIAEGFK

SEQ ID NO: 33038 - protein, 8 aa, Artificial Sequence
  Peptide Derived from Human Papillomavirus
PVYEINDK

SEQ ID NO: 33039 - protein, 11 aa, Artificial Sequence
  Peptide Derived from Human Papillomavirus
PVYEINDKNWK

SEQ ID NO: 33040 - protein, 9 aa, Artificial Sequence
  Peptide Derived from Human Papillomavirus
QAELETAQA

SEQ ID NO: 33041 - protein, 11 aa, Artificial Sequence
  Peptide Derived from Human Papillomavirus
QAELETAQALF

SEQ ID NO: 33042 - protein, 9 aa, Artificial Sequence
  Peptide Derived from Human Papillomavirus
QAKYLKDCA

SEQ ID NO: 33043 - protein, 10 aa, Artificial Sequence
  Peptide Derived from Human Papillomavirus
QALFHAQEVH

SEQ ID NO: 33044 - protein, 8 aa, Artificial Sequence
  Peptide Derived from Human Papillomavirus
QCTIAQLK

SEQ ID NO: 33045 - protein, 10 aa, Artificial Sequence
  Peptide Derived from Human Papillomavirus
QFLRYQQIEF

SEQ ID NO: 33046 - protein, 8 aa, Artificial Sequence
  Peptide Derived from Human Papillomavirus
QGAMLAVF

SEQ ID NO: 33047 - protein, 9 aa, Artificial Sequence
  Peptide Derived from Human Papillomavirus
QGAMLAVFK

SEQ ID NO: 33048 - protein, 8 aa, Artificial Sequence
  Peptide Derived from Human Papillomavirus
QGTFCEQA

SEQ ID NO: 33049 - protein, 10 aa, Artificial Sequence
  Peptide Derived from Human Papillomavirus
QIEFITFLGA

SEQ ID NO: 33050 - protein, 10 aa, Artificial Sequence
  Peptide Derived from Human Papillomavirus
QIQVTTNGEH

SEQ ID NO: 33051 - protein, 11 aa, Artificial Sequence
  Peptide Derived from Human Papillomavirus
QLKDLLKVNNK

SEQ ID NO: 33052 - protein, 9 aa, Artificial Sequence
  Peptide Derived from Human Papillomavirus
QMNMSQWIR

SEQ ID NO: 33053 - protein, 10 aa, Artificial Sequence
  Peptide Derived from Human Papillomavirus
QMNMSQWIRF

SEQ ID NO: 33054 - protein, 11 aa, Artificial Sequence
  Peptide Derived from Human Papillomavirus
QMNMSQWIRFR

SEQ ID NO: 33055 - protein, 8 aa, Artificial Sequence
  Peptide Derived from Human Papillomavirus
QVLHVLKR

SEQ ID NO: 33056 - protein, 9 aa, Artificial Sequence
  Peptide Derived from Human Papillomavirus
QVLHVLKRK

SEQ ID NO: 33057 - protein, 10 aa, Artificial Sequence
  Peptide Derived from Human Papillomavirus
QVLHVLKRKF

SEQ ID NO: 33058 - protein, 11 aa, Artificial Sequence
  Peptide Derived from Human Papillomavirus
QVLHVLKRKFA

SEQ ID NO: 33059 - protein, 8 aa, Artificial Sequence
  Peptide Derived from Human Papillomavirus
QVTTNGEH

SEQ ID NO: 33060 - protein, 10 aa, Artificial Sequence
  Peptide Derived from Human Papillomavirus
RITVFEFPNA

SEQ ID NO: 33061 - protein, 11 aa, Artificial Sequence
  Peptide Derived from Human Papillomavirus
RITVFEFPNAF

SEQ ID NO: 33062 - protein, 11 aa, Artificial Sequence
  Peptide Derived from Human Papillomavirus
RLDLHEEEEDA

SEQ ID NO: 33063 - protein, 11 aa, Artificial Sequence
  Peptide Derived from Human Papillomavirus
RLEVDTELSPR

SEQ ID NO: 33064 - protein, 10 aa, Artificial Sequence
  Peptide Derived from Human Papillomavirus
RLFTISDSGY

SEQ ID NO: 33065 - protein, 8 aa, Artificial Sequence
  Peptide Derived from Human Papillomavirus
RSSVAALY

SEQ ID NO: 33066 - protein, 10 aa, Artificial Sequence
  Peptide Derived from Human Papillomavirus
RSSVAALYWY

SEQ ID NO: 33067 - protein, 11 aa, Artificial Sequence
  Peptide Derived from Human Papillomavirus
RSSVAALYWYR

SEQ ID NO: 33068 - protein, 9 aa, Artificial Sequence
  Peptide Derived from Human Papillomavirus
RTWSRLDLH

SEQ ID NO: 33069 - protein, 8 aa, Artificial Sequence
  Peptide Derived from Human Papillomavirus
SDDEDENA

SEQ ID NO: 33070 - protein, 8 aa, Artificial Sequence
  Peptide Derived from Human Papillomavirus
SDMAFEYA

SEQ ID NO: 33071 - protein, 11 aa, Artificial Sequence
  Peptide Derived from Human Papillomavirus
SDMAFEYALLA

SEQ ID NO: 33072 - protein, 9 aa, Artificial Sequence
  Peptide Derived from Human Papillomavirus
SFIHFIQGA

SEQ ID NO: 33073 - protein, 8 aa, Artificial Sequence
  Peptide Derived from Human Papillomavirus
SFLKGTPK

SEQ ID NO: 33074 - protein, 9 aa, Artificial Sequence
  Peptide Derived from Human Papillomavirus
SFLKGTPKK

SEQ ID NO: 33075 - protein, 9 aa, Artificial Sequence
  Peptide Derived from Human Papillomavirus
SFTDLVRNF

SEQ ID NO: 33076 - protein, 10 aa, Artificial Sequence
  Peptide Derived from Human Papillomavirus
SFTDLVRNFK

SEQ ID NO: 33077 - protein, 8 aa, Artificial Sequence
  Peptide Derived from Human Papillomavirus
SFVNSTSH

SEQ ID NO: 33078 - protein, 9 aa, Artificial Sequence
  Peptide Derived from Human Papillomavirus
SFVNSTSHF

SEQ ID NO: 33079 - protein, 8 aa, Artificial Sequence
  Peptide Derived from Human Papillomavirus
SGQKKAKR

SEQ ID NO: 33080 - protein, 9 aa, Artificial Sequence
  Peptide Derived from Human Papillomavirus
SGQKKAKRR

SEQ ID NO: 33081 - protein, 11 aa, Artificial Sequence
  Peptide Derived from Human Papillomavirus
SGQKKAKRRLF

SEQ ID NO: 33082 - protein, 10 aa, Artificial Sequence
  Peptide Derived from Human Papillomavirus
SGYGCSEVEA

SEQ ID NO: 33083 - protein, 8 aa, Artificial Sequence
  Peptide Derived from Human Papillomavirus
SLNSGQKK

SEQ ID NO: 33084 - protein, 9 aa, Artificial Sequence
  Peptide Derived from Human Papillomavirus
SLNSGQKKA

SEQ ID NO: 33085 - protein, 10 aa, Artificial Sequence
  Peptide Derived from Human Papillomavirus
SLNSGQKKAK

SEQ ID NO: 33086 - protein, 11 aa, Artificial Sequence
  Peptide Derived from Human Papillomavirus
SLNSGQKKAKR

SEQ ID NO: 33087 - protein, 9 aa, Artificial Sequence
  Peptide Derived from Human Papillomavirus
SSVAALYWY

SEQ ID NO: 33088 - protein, 10 aa, Artificial Sequence
  Peptide Derived from Human Papillomavirus
SSVAALYWYR

SEQ ID NO: 33089 - protein, 10 aa, Artificial Sequence
  Peptide Derived from Human Papillomavirus
STENSPLGER

SEQ ID NO: 33090 - protein, 8 aa, Artificial Sequence
  Peptide Derived from Human Papillomavirus
SVAALYWY

SEQ ID NO: 33091 - protein, 9 aa, Artificial Sequence
  Peptide Derived from Human Papillomavirus
SVAALYWYR

SEQ ID NO: 33092 - protein, 11 aa, Artificial Sequence
  Peptide Derived from Human Papillomavirus
TAIFGVNPTIA

SEQ ID NO: 33093 - protein, 8 aa, Artificial Sequence
  Peptide Derived from Human Papillomavirus
TAQALFHA

SEQ ID NO: 33094 - protein, 9 aa, Artificial Sequence
  Peptide Derived from Human Papillomavirus
TCMLIQPPK

SEQ ID NO: 33095 - protein, 11 aa, Artificial Sequence
  Peptide Derived from Human Papillomavirus
TCMLIQPPKLR

SEQ ID NO: 33096 - protein, 8 aa, Artificial Sequence
  Peptide Derived from Human Papillomavirus
TCTDWVTA

SEQ ID NO: 33097 - protein, 10 aa, Artificial Sequence
  Peptide Derived from Human Papillomavirus
TCTDWVTAIF

SEQ ID NO: 33098 - protein, 9 aa, Artificial Sequence
  Peptide Derived from Human Papillomavirus
TCWTYFDTY

SEQ ID NO: 33099 - protein, 11 aa, Artificial Sequence
  Peptide Derived from Human Papillomavirus
TCWTYFDTYMR

SEQ ID NO: 33100 - protein, 8 aa, Artificial Sequence
  Peptide Derived from Human Papillomavirus
TDESDMAF

SEQ ID NO: 33101 - protein, 10 aa, Artificial Sequence
  Peptide Derived from Human Papillomavirus
TDESDMAFEY

SEQ ID NO: 33102 - protein, 11 aa, Artificial Sequence
  Peptide Derived from Human Papillomavirus
TDESDMAFEYA

SEQ ID NO: 33103 - protein, 8 aa, Artificial Sequence
  Peptide Derived from Human Papillomavirus
TDLVRNFK

SEQ ID NO: 33104 - protein, 11 aa, Artificial Sequence
  Peptide Derived from Human Papillomavirus
TDLVRNFKSDK

SEQ ID NO: 33105 - protein, 10 aa, Artificial Sequence
  Peptide Derived from Human Papillomavirus
TDTGSDMVDF

SEQ ID NO: 33106 - protein, 11 aa, Artificial Sequence
  Peptide Derived from Human Papillomavirus
TDTKVAMLDDA

SEQ ID NO: 33107 - protein, 8 aa, Artificial Sequence
  Peptide Derived from Human Papillomavirus
TDWVTAIF

SEQ ID NO: 33108 - protein, 11 aa, Artificial Sequence
  Peptide Derived from Human Papillomavirus
TFCEQAELETA

SEQ ID NO: 33109 - protein, 10 aa, Artificial Sequence
  Peptide Derived from Human Papillomavirus
TFKLRAGQNH

SEQ ID NO: 33110 - protein, 11 aa, Artificial Sequence
  Peptide Derived from Human Papillomavirus
TFKLRAGQNHR

SEQ ID NO: 33111 - protein, 9 aa, Artificial Sequence
  Peptide Derived from Human Papillomavirus
TFLGALKSF

SEQ ID NO: 33112 - protein, 11 aa, Artificial Sequence
  Peptide Derived from Human Papillomavirus
TFLGALKSFLK

SEQ ID NO: 33113 - protein, 8 aa, Artificial Sequence
  Peptide Derived from Human Papillomavirus
TGCNGWFY

SEQ ID NO: 33114 - protein, 11 aa, Artificial Sequence
  Peptide Derived from Human Papillomavirus
TGCNGWFYVQA

SEQ ID NO: 33115 - protein, 10 aa, Artificial Sequence
  Peptide Derived from Human Papillomavirus
TGKSYFGMSF

SEQ ID NO: 33116 - protein, 8 aa, Artificial Sequence
  Peptide Derived from Human Papillomavirus
TGSDMVDF

SEQ ID NO: 33117 - protein, 10 aa, Artificial Sequence
  Peptide Derived from Human Papillomavirus
TIAQLKDLLK

SEQ ID NO: 33118 - protein, 9 aa, Artificial Sequence
  Peptide Derived from Human Papillomavirus
TLIQPFILY

SEQ ID NO: 33119 - protein, 10 aa, Artificial Sequence
  Peptide Derived from Human Papillomavirus
TLIQPFILYA

SEQ ID NO: 33120 - protein, 11 aa, Artificial Sequence
  Peptide Derived from Human Papillomavirus
TLIQPFILYAH

SEQ ID NO: 33121 - protein, 8 aa, Artificial Sequence
  Peptide Derived from Human Papillomavirus
TMCKHYRR

SEQ ID NO: 33122 - protein, 9 aa, Artificial Sequence
  Peptide Derived from Human Papillomavirus
TMCKHYRRA

SEQ ID NO: 33123 - protein, 11 aa, Artificial Sequence
  Peptide Derived from Human Papillomavirus
TMCKHYRRAQK

SEQ ID NO: 33124 - protein, 9 aa, Artificial Sequence
  Peptide Derived from Human Papillomavirus
TTCTDWVTA

SEQ ID NO: 33125 - protein, 11 aa, Artificial Sequence
  Peptide Derived from Human Papillomavirus
TTCTDWVTAIF

SEQ ID NO: 33126 - protein, 10 aa, Artificial Sequence
  Peptide Derived from Human Papillomavirus
TTCWTYFDTY

SEQ ID NO: 33127 - protein, 8 aa, Artificial Sequence
  Peptide Derived from Human Papillomavirus
TTNIHPAK

SEQ ID NO: 33128 - protein, 11 aa, Artificial Sequence
  Peptide Derived from Human Papillomavirus
TTNIHPAKDNR

SEQ ID NO: 33129 - protein, 8 aa, Artificial Sequence
  Peptide Derived from Human Papillomavirus
TTTCWTYF

SEQ ID NO: 33130 - protein, 11 aa, Artificial Sequence
  Peptide Derived from Human Papillomavirus
TTTCWTYFDTY

SEQ ID NO: 33131 - protein, 11 aa, Artificial Sequence
  Peptide Derived from Human Papillomavirus
TVAKGLSTLLH

SEQ ID NO: 33132 - protein, 8 aa, Artificial Sequence
  Peptide Derived from Human Papillomavirus
TVFEFPNA

SEQ ID NO: 33133 - protein, 9 aa, Artificial Sequence
  Peptide Derived from Human Papillomavirus
TVFEFPNAF

SEQ ID NO: 33134 - protein, 11 aa, Artificial Sequence
  Peptide Derived from Human Papillomavirus
TVFEFPNAFPF

SEQ ID NO: 33135 - protein, 8 aa, Artificial Sequence
  Peptide Derived from Human Papillomavirus
VAALYWYR

SEQ ID NO: 33136 - protein, 10 aa, Artificial Sequence
  Peptide Derived from Human Papillomavirus
VAKGLSTLLH

SEQ ID NO: 33137 - protein, 9 aa, Artificial Sequence
  Peptide Derived from Human Papillomavirus
VCSGGSTEA

SEQ ID NO: 33138 - protein, 10 aa, Artificial Sequence
  Peptide Derived from Human Papillomavirus
VDFIDTQGTF

SEQ ID NO: 33139 - protein, 8 aa, Artificial Sequence
  Peptide Derived from Human Papillomavirus
VDTELSPR

SEQ ID NO: 33140 - protein, 10 aa, Artificial Sequence
  Peptide Derived from Human Papillomavirus
VFCGPANTGK

SEQ ID NO: 33141 - protein, 8 aa, Artificial Sequence
  Peptide Derived from Human Papillomavirus
VFEFPNAF

SEQ ID NO: 33142 - protein, 10 aa, Artificial Sequence
  Peptide Derived from Human Papillomavirus
VFEFPNAFPF

SEQ ID NO: 33143 - protein, 10 aa, Artificial Sequence
  Peptide Derived from Human Papillomavirus
VFKDTYGLSF

SEQ ID NO: 33144 - protein, 10 aa, Artificial Sequence
  Peptide Derived from Human Papillomavirus
VISDDEDENA

SEQ ID NO: 33145 - protein, 10 aa, Artificial Sequence
  Peptide Derived from Human Papillomavirus
VISFVNSTSH

SEQ ID NO: 33146 - protein, 11 aa, Artificial Sequence
  Peptide Derived from Human Papillomavirus
VISFVNSTSHF

SEQ ID NO: 33147 - protein, 8 aa, Artificial Sequence
  Peptide Derived from Human Papillomavirus
VLHVLKRK

SEQ ID NO: 33148 - protein, 9 aa, Artificial Sequence
  Peptide Derived from Human Papillomavirus
VLHVLKRKF

SEQ ID NO: 33149 - protein, 10 aa, Artificial Sequence
  Peptide Derived from Human Papillomavirus
VLHVLKRKFA

SEQ ID NO: 33150 - protein, 8 aa, Artificial Sequence
  Peptide Derived from Human Papillomavirus
VLILALLR

SEQ ID NO: 33151 - protein, 9 aa, Artificial Sequence
  Peptide Derived from Human Papillomavirus
VLILALLRY

SEQ ID NO: 33152 - protein, 10 aa, Artificial Sequence
  Peptide Derived from Human Papillomavirus
VLILALLRYK

SEQ ID NO: 33153 - protein, 11 aa, Artificial Sequence
  Peptide Derived from Human Papillomavirus
VMGDTPEWIQR

SEQ ID NO: 33154 - protein, 10 aa, Artificial Sequence
  Peptide Derived from Human Papillomavirus
WFYVQAIVDK

SEQ ID NO: 33155 - protein, 11 aa, Artificial Sequence
  Peptide Derived from Human Papillomavirus
WFYVQAIVDKK

SEQ ID NO: 33156 - protein, 10 aa, Artificial Sequence
  Peptide Derived from Human Papillomavirus
WGVLILALLR

SEQ ID NO: 33157 - protein, 11 aa, Artificial Sequence
  Peptide Derived from Human Papillomavirus
WGVLILALLRY

SEQ ID NO: 33158 - protein, 10 aa, Artificial Sequence
  Peptide Derived from Human Papillomavirus
WIQRLTIIQH

SEQ ID NO: 33159 - protein, 8 aa, Artificial Sequence
  Peptide Derived from Human Papillomavirus
WIRFRCSK

SEQ ID NO: 33160 - protein, 9 aa, Artificial Sequence
  Peptide Derived from Human Papillomavirus
WLEPLTDTK

SEQ ID NO: 33161 - protein, 11 aa, Artificial Sequence
  Peptide Derived from Human Papillomavirus
WLEPLTDTKVA

SEQ ID NO: 33162 - protein, 9 aa, Artificial Sequence
  Peptide Derived from Human Papillomavirus
WTYFDTYMR

SEQ ID NO: 33163 - protein, 11 aa, Artificial Sequence
  Peptide Derived from Human Papillomavirus
WTYFDTYMRNA

SEQ ID NO: 33164 - protein, 10 aa, Artificial Sequence
  Peptide Derived from Human Papillomavirus
YAHIQCLDCK

SEQ ID NO: 33165 - protein, 11 aa, Artificial Sequence
  Peptide Derived from Human Papillomavirus
YALLADSNSNA

SEQ ID NO: 33166 - protein, 9 aa, Artificial Sequence
  Peptide Derived from Human Papillomavirus
YFDTYMRNA

SEQ ID NO: 33167 - protein, 8 aa, Artificial Sequence
  Peptide Derived from Human Papillomavirus
YFGMSFIH

SEQ ID NO: 33168 - protein, 9 aa, Artificial Sequence
  Peptide Derived from Human Papillomavirus
YFGMSFIHF

SEQ ID NO: 33169 - protein, 8 aa, Artificial Sequence
  Peptide Derived from Human Papillomavirus
YGCSEVEA

SEQ ID NO: 33170 - protein, 10 aa, Artificial Sequence
  Peptide Derived from Human Papillomavirus
YGLSFTDLVR

SEQ ID NO: 33171 - protein, 9 aa, Artificial Sequence
  Peptide Derived from Human Papillomavirus
YLESRITVF

SEQ ID NO: 33172 - protein, 11 aa, Artificial Sequence
  Peptide Derived from Human Papillomavirus
YLESRITVFEF

SEQ ID NO: 33173 - protein, 10 aa, Artificial Sequence
  Peptide Derived from Human Papillomavirus
YLKDCATMCK

SEQ ID NO: 33174 - protein, 11 aa, Artificial Sequence
  Peptide Derived from Human Papillomavirus
YLKDCATMCKH

SEQ ID NO: 33175 - protein, 8 aa, Artificial Sequence
  Peptide Derived from Human Papillomavirus
YVQAIVDK

SEQ ID NO: 33176 - protein, 9 aa, Artificial Sequence
  Peptide Derived from Human Papillomavirus
YVQAIVDKK

SEQ ID NO: 33177 - protein, 9 aa, Artificial Sequence
  Peptide Derived from Human Papillomavirus
AATPTGNNK

SEQ ID NO: 33178 - protein, 10 aa, Artificial Sequence
  Peptide Derived from Human Papillomavirus
AATPTGNNKR

SEQ ID NO: 33179 - protein, 11 aa, Artificial Sequence
  Peptide Derived from Human Papillomavirus
AATPTGNNKRR

SEQ ID NO: 33180 - protein, 11 aa, Artificial Sequence
  Peptide Derived from Human Papillomavirus
AATRPGHCGLA

SEQ ID NO: 33181 - protein, 8 aa, Artificial Sequence
  Peptide Derived from Human Papillomavirus
AGTWDKTA

SEQ ID NO: 33182 - protein, 9 aa, Artificial Sequence
  Peptide Derived from Human Papillomavirus
AIFFAAREH

SEQ ID NO: 33183 - protein, 9 aa, Artificial Sequence
  Peptide Derived from Human Papillomavirus
ALQGLAQSR

SEQ ID NO: 33184 - protein, 10 aa, Artificial Sequence
  Peptide Derived from Human Papillomavirus
ALQGLAQSRY

SEQ ID NO: 33185 - protein, 11 aa, Artificial Sequence
  Peptide Derived from Human Papillomavirus
ALQGLAQSRYK

SEQ ID NO: 33186 - protein, 10 aa, Artificial Sequence
  Peptide Derived from Human Papillomavirus
ATCVSHRGLY

SEQ ID NO: 33187 - protein, 11 aa, Artificial Sequence
  Peptide Derived from Human Papillomavirus
ATCVSHRGLYY

SEQ ID NO: 33188 - protein, 8 aa, Artificial Sequence
  Peptide Derived from Human Papillomavirus
ATPTGNNK

SEQ ID NO: 33189 - protein, 9 aa, Artificial Sequence
  Peptide Derived from Human Papillomavirus
ATPTGNNKR

SEQ ID NO: 33190 - protein, 10 aa, Artificial Sequence
  Peptide Derived from Human Papillomavirus
ATPTGNNKRR

SEQ ID NO: 33191 - protein, 11 aa, Artificial Sequence
  Peptide Derived from Human Papillomavirus
ATPTGNNKRRK

SEQ ID NO: 33192 - protein, 10 aa, Artificial Sequence
  Peptide Derived from Human Papillomavirus
ATQLVKQLQH

SEQ ID NO: 33193 - protein, 10 aa, Artificial Sequence
  Peptide Derived from Human Papillomavirus
ATRPGHCGLA

SEQ ID NO: 33194 - protein, 8 aa, Artificial Sequence
  Peptide Derived from Human Papillomavirus
CGLAEKQH

SEQ ID NO: 33195 - protein, 10 aa, Artificial Sequence
  Peptide Derived from Human Papillomavirus
CGPVNPLLGA

SEQ ID NO: 33196 - protein, 11 aa, Artificial Sequence
  Peptide Derived from Human Papillomavirus
CGPVNPLLGAA

SEQ ID NO: 33197 - protein, 8 aa, Artificial Sequence
  Peptide Derived from Human Papillomavirus
CLRYRLRK

SEQ ID NO: 33198 - protein, 9 aa, Artificial Sequence
  Peptide Derived from Human Papillomavirus
CLRYRLRKH

SEQ ID NO: 33199 - protein, 11 aa, Artificial Sequence
  Peptide Derived from Human Papillomavirus
CMTYVAWDSVY

SEQ ID NO: 33200 - protein, 10 aa, Artificial Sequence
  Peptide Derived from Human Papillomavirus
CSGNTTPIIH

SEQ ID NO: 33201 - protein, 10 aa, Artificial Sequence
  Peptide Derived from Human Papillomavirus
CSTSDDTVSA

SEQ ID NO: 33202 - protein, 9 aa, Artificial Sequence
  Peptide Derived from Human Papillomavirus
CVQDKIIDH

SEQ ID NO: 33203 - protein, 10 aa, Artificial Sequence
  Peptide Derived from Human Papillomavirus
CVQDKIIDHY

SEQ ID NO: 33204 - protein, 8 aa, Artificial Sequence
  Peptide Derived from Human Papillomavirus
CVSHRGLY

SEQ ID NO: 33205 - protein, 9 aa, Artificial Sequence
  Peptide Derived from Human Papillomavirus
CVSHRGLYY

SEQ ID NO: 33206 - protein, 11 aa, Artificial Sequence
  Peptide Derived from Human Papillomavirus
CVSHRGLYYVK

SEQ ID NO: 33207 - protein, 9 aa, Artificial Sequence
  Peptide Derived from Human Papillomavirus
DAGTWDKTA

SEQ ID NO: 33208 - protein, 11 aa, Artificial Sequence
  Peptide Derived from Human Papillomavirus
DDTVSATQLVK

SEQ ID NO: 33209 - protein, 10 aa, Artificial Sequence
  Peptide Derived from Human Papillomavirus
DGNKDNCMTY

SEQ ID NO: 33210 - protein, 8 aa, Artificial Sequence
  Peptide Derived from Human Papillomavirus
DIDSQIQY

SEQ ID NO: 33211 - protein, 11 aa, Artificial Sequence
  Peptide Derived from Human Papillomavirus
DISSTWHWTGA

SEQ ID NO: 33212 - protein, 11 aa, Artificial Sequence
  Peptide Derived from Human Papillomavirus
DSKDIDSQIQY

SEQ ID NO: 33213 - protein, 11 aa, Artificial Sequence
  Peptide Derived from Human Papillomavirus
DSQIQYWQLIR

SEQ ID NO: 33214 - protein, 9 aa, Artificial Sequence
  Peptide Derived from Human Papillomavirus
DSVQILVGY

SEQ ID NO: 33215 - protein, 9 aa, Artificial Sequence
  Peptide Derived from Human Papillomavirus
DSVYYMTDA

SEQ ID NO: 33216 - protein, 10 aa, Artificial Sequence
  Peptide Derived from Human Papillomavirus
DTVSATQLVK

SEQ ID NO: 33217 - protein, 8 aa, Artificial Sequence
  Peptide Derived from Human Papillomavirus
EFKSECEK

SEQ ID NO: 33218 - protein, 9 aa, Artificial Sequence
  Peptide Derived from Human Papillomavirus
EFKSECEKY

SEQ ID NO: 33219 - protein, 10 aa, Artificial Sequence
  Peptide Derived from Human Papillomavirus
EGYNTFYIEF

SEQ ID NO: 33220 - protein, 11 aa, Artificial Sequence
  Peptide Derived from Human Papillomavirus
EGYNTFYIEFK

SEQ ID NO: 33221 - protein, 10 aa, Artificial Sequence
  Peptide Derived from Human Papillomavirus
ELQMALQGLA

SEQ ID NO: 33222 - protein, 9 aa, Artificial Sequence
  Peptide Derived from Human Papillomavirus
ELWNTEPTH

SEQ ID NO: 33223 - protein, 11 aa, Artificial Sequence
  Peptide Derived from Human Papillomavirus
ELWNTEPTHCF

SEQ ID NO: 33224 - protein, 11 aa, Artificial Sequence
  Peptide Derived from Human Papillomavirus
FDGNKDNCMTY

SEQ ID NO: 33225 - protein, 10 aa, Artificial Sequence
  Peptide Derived from Human Papillomavirus
GAATPTGNNK

SEQ ID NO: 33226 - protein, 11 aa, Artificial Sequence
  Peptide Derived from Human Papillomavirus
GAATPTGNNKR

SEQ ID NO: 33227 - protein, 10 aa, Artificial Sequence
  Peptide Derived from Human Papillomavirus
GDRNSLKCLR

SEQ ID NO: 33228 - protein, 11 aa, Artificial Sequence
  Peptide Derived from Human Papillomavirus
GDRNSLKCLRY

SEQ ID NO: 33229 - protein, 8 aa, Artificial Sequence
  Peptide Derived from Human Papillomavirus
GGQTVQVY

SEQ ID NO: 33230 - protein, 9 aa, Artificial Sequence
  Peptide Derived from Human Papillomavirus
GGQTVQVYF

SEQ ID NO: 33231 - protein, 8 aa, Artificial Sequence
  Peptide Derived from Human Papillomavirus
GILTVTYH

SEQ ID NO: 33232 - protein, 8 aa, Artificial Sequence
  Peptide Derived from Human Papillomavirus
GLAQSRYK

SEQ ID NO: 33233 - protein, 9 aa, Artificial Sequence
  Peptide Derived from Human Papillomavirus
GLYYVKEGY

SEQ ID NO: 33234 - protein, 11 aa, Artificial Sequence
  Peptide Derived from Human Papillomavirus
GTAKTYGQTSA

SEQ ID NO: 33235 - protein, 9 aa, Artificial Sequence
  Peptide Derived from Human Papillomavirus
HCGLAEKQH

SEQ ID NO: 33236 - protein, 11 aa, Artificial Sequence
  Peptide Derived from Human Papillomavirus
HCGPVNPLLGA

SEQ ID NO: 33237 - protein, 8 aa, Artificial Sequence
  Peptide Derived from Human Papillomavirus
HGIQTLNH

SEQ ID NO: 33238 - protein, 10 aa, Artificial Sequence
  Peptide Derived from Human Papillomavirus
HLKGDRNSLK

SEQ ID NO: 33239 - protein, 8 aa, Artificial Sequence
  Peptide Derived from Human Papillomavirus
HSETQRTK

SEQ ID NO: 33240 - protein, 9 aa, Artificial Sequence
  Peptide Derived from Human Papillomavirus
HSETQRTKF

SEQ ID NO: 33241 - protein, 9 aa, Artificial Sequence
  Peptide Derived from Human Papillomavirus
IDHYENDSK

SEQ ID NO: 33242 - protein, 8 aa, Artificial Sequence
  Peptide Derived from Human Papillomavirus
IFFAAREH

SEQ ID NO: 33243 - protein, 10 aa, Artificial Sequence
  Peptide Derived from Human Papillomavirus
IIDHYENDSK

SEQ ID NO: 33244 - protein, 8 aa, Artificial Sequence
  Peptide Derived from Human Papillomavirus
IIHLKGDR

SEQ ID NO: 33245 - protein, 8 aa, Artificial Sequence
  Peptide Derived from Human Papillomavirus
ISKSKAHK

SEQ ID NO: 33246 - protein, 9 aa, Artificial Sequence
  Peptide Derived from Human Papillomavirus
ISKSKAHKA

SEQ ID NO: 33247 - protein, 10 aa, Artificial Sequence
  Peptide Derived from Human Papillomavirus
ISSTWHWTGA

SEQ ID NO: 33248 - protein, 11 aa, Artificial Sequence
  Peptide Derived from Human Papillomavirus
KAHKAIELQMA

SEQ ID NO: 33249 - protein, 8 aa, Artificial Sequence
  Peptide Derived from Human Papillomavirus
KAIELQMA

SEQ ID NO: 33250 - protein, 8 aa, Artificial Sequence
  Peptide Derived from Human Papillomavirus
KCLRYRLR

SEQ ID NO: 33251 - protein, 9 aa, Artificial Sequence
  Peptide Derived from Human Papillomavirus
KCLRYRLRK

SEQ ID NO: 33252 - protein, 10 aa, Artificial Sequence
  Peptide Derived from Human Papillomavirus
KCLRYRLRKH

SEQ ID NO: 33253 - protein, 9 aa, Artificial Sequence
  Peptide Derived from Human Papillomavirus
KDIDSQIQY

SEQ ID NO: 33254 - protein, 9 aa, Artificial Sequence
  Peptide Derived from Human Papillomavirus
KDNCMTYVA

SEQ ID NO: 33255 - protein, 8 aa, Artificial Sequence
  Peptide Derived from Human Papillomavirus
KGDRNSLK

SEQ ID NO: 33256 - protein, 11 aa, Artificial Sequence
  Peptide Derived from Human Papillomavirus
KGDRNSLKCLR

SEQ ID NO: 33257 - protein, 9 aa, Artificial Sequence
  Peptide Derived from Human Papillomavirus
KGGQTVQVY

SEQ ID NO: 33258 - protein, 10 aa, Artificial Sequence
  Peptide Derived from Human Papillomavirus
KGGQTVQVYF

SEQ ID NO: 33259 - protein, 11 aa, Artificial Sequence
  Peptide Derived from Human Papillomavirus
KIIDHYENDSK

SEQ ID NO: 33260 - protein, 8 aa, Artificial Sequence
  Peptide Derived from Human Papillomavirus
KTATCVSH

SEQ ID NO: 33261 - protein, 9 aa, Artificial Sequence
  Peptide Derived from Human Papillomavirus
KTATCVSHR

SEQ ID NO: 33262 - protein, 9 aa, Artificial Sequence
  Peptide Derived from Human Papillomavirus
KTGILTVTY

SEQ ID NO: 33263 - protein, 10 aa, Artificial Sequence
  Peptide Derived from Human Papillomavirus
KTGILTVTYH

SEQ ID NO: 33264 - protein, 8 aa, Artificial Sequence
  Peptide Derived from Human Papillomavirus
KTYGQTSA

SEQ ID NO: 33265 - protein, 9 aa, Artificial Sequence
  Peptide Derived from Human Papillomavirus
KTYGQTSAA

SEQ ID NO: 33266 - protein, 11 aa, Artificial Sequence
  Peptide Derived from Human Papillomavirus
KTYGQTSAATR

SEQ ID NO: 33267 - protein, 11 aa, Artificial Sequence
  Peptide Derived from Human Papillomavirus
LCSGNTTPIIH

SEQ ID NO: 33268 - protein, 11 aa, Artificial Sequence
  Peptide Derived from Human Papillomavirus
LGAATPTGNNK

SEQ ID NO: 33269 - protein, 9 aa, Artificial Sequence
  Peptide Derived from Human Papillomavirus
LIRWENAIF

SEQ ID NO: 33270 - protein, 10 aa, Artificial Sequence
  Peptide Derived from Human Papillomavirus
LIRWENAIFF

SEQ ID NO: 33271 - protein, 11 aa, Artificial Sequence
  Peptide Derived from Human Papillomavirus
LIRWENAIFFA

SEQ ID NO: 33272 - protein, 11 aa, Artificial Sequence
  Peptide Derived from Human Papillomavirus
LSCVQDKIIDH

SEQ ID NO: 33273 - protein, 11 aa, Artificial Sequence
  Peptide Derived from Human Papillomavirus
LSERLSCVQDK

SEQ ID NO: 33274 - protein, 11 aa, Artificial Sequence
  Peptide Derived from Human Papillomavirus
LTVTYHSETQR

SEQ ID NO: 33275 - protein, 10 aa, Artificial Sequence
  Peptide Derived from Human Papillomavirus
MALQGLAQSR

SEQ ID NO: 33276 - protein, 11 aa, Artificial Sequence
  Peptide Derived from Human Papillomavirus
MALQGLAQSRY

SEQ ID NO: 33277 - protein, 11 aa, Artificial Sequence
  Peptide Derived from Human Papillomavirus
MCSTSDDTVSA

SEQ ID NO: 33278 - protein, 9 aa, Artificial Sequence
  Peptide Derived from Human Papillomavirus
MTDAGTWDK

SEQ ID NO: 33279 - protein, 11 aa, Artificial Sequence
  Peptide Derived from Human Papillomavirus
MTDAGTWDKTA

SEQ ID NO: 33280 - protein, 10 aa, Artificial Sequence
  Peptide Derived from Human Papillomavirus
MTYVAWDSVY

SEQ ID NO: 33281 - protein, 11 aa, Artificial Sequence
  Peptide Derived from Human Papillomavirus
MTYVAWDSVYY

SEQ ID NO: 33282 - protein, 8 aa, Artificial Sequence
  Peptide Derived from Human Papillomavirus
NAIFFAAR

SEQ ID NO: 33283 - protein, 10 aa, Artificial Sequence
  Peptide Derived from Human Papillomavirus
NAIFFAAREH

SEQ ID NO: 33284 - protein, 8 aa, Artificial Sequence
  Peptide Derived from Human Papillomavirus
NISKSKAH

SEQ ID NO: 33285 - protein, 9 aa, Artificial Sequence
  Peptide Derived from Human Papillomavirus
NISKSKAHK

SEQ ID NO: 33286 - protein, 10 aa, Artificial Sequence
  Peptide Derived from Human Papillomavirus
NISKSKAHKA

SEQ ID NO: 33287 - protein, 8 aa, Artificial Sequence
  Peptide Derived from Human Papillomavirus
NSLKCLRY

SEQ ID NO: 33288 - protein, 9 aa, Artificial Sequence
  Peptide Derived from Human Papillomavirus
NSLKCLRYR

SEQ ID NO: 33289 - protein, 11 aa, Artificial Sequence
  Peptide Derived from Human Papillomavirus
NSLKCLRYRLR

SEQ ID NO: 33290 - protein, 8 aa, Artificial Sequence
  Peptide Derived from Human Papillomavirus
NTEPTHCF

SEQ ID NO: 33291 - protein, 9 aa, Artificial Sequence
  Peptide Derived from Human Papillomavirus
NTEPTHCFK

SEQ ID NO: 33292 - protein, 10 aa, Artificial Sequence
  Peptide Derived from Human Papillomavirus
NTEPTHCFKK

SEQ ID NO: 33293 - protein, 8 aa, Artificial Sequence
  Peptide Derived from Human Papillomavirus
NTFYIEFK

SEQ ID NO: 33294 - protein, 8 aa, Artificial Sequence
  Peptide Derived from Human Papillomavirus
NTGTWEVH

SEQ ID NO: 33295 - protein, 9 aa, Artificial Sequence
  Peptide Derived from Human Papillomavirus
NTGTWEVHF

SEQ ID NO: 33296 - protein, 9 aa, Artificial Sequence
  Peptide Derived from Human Papillomavirus
NTTPIIHLK

SEQ ID NO: 33297 - protein, 9 aa, Artificial Sequence
  Peptide Derived from Human Papillomavirus
PAYNISKSK

SEQ ID NO: 33298 - protein, 10 aa, Artificial Sequence
  Peptide Derived from Human Papillomavirus
PAYNISKSKA

SEQ ID NO: 33299 - protein, 11 aa, Artificial Sequence
  Peptide Derived from Human Papillomavirus
PAYNISKSKAH

SEQ ID NO: 33300 - protein, 10 aa, Artificial Sequence
  Peptide Derived from Human Papillomavirus
PDSVQILVGY

SEQ ID NO: 33301 - protein, 9 aa, Artificial Sequence
  Peptide Derived from Human Papillomavirus
PGHCGLAEK

SEQ ID NO: 33302 - protein, 11 aa, Artificial Sequence
  Peptide Derived from Human Papillomavirus
PGHCGLAEKQH

SEQ ID NO: 33303 - protein, 9 aa, Artificial Sequence
  Peptide Derived from Human Papillomavirus
PIIHLKGDR

SEQ ID NO: 33304 - protein, 8 aa, Artificial Sequence
  Peptide Derived from Human Papillomavirus
PTGNNKRR

SEQ ID NO: 33305 - protein, 9 aa, Artificial Sequence
  Peptide Derived from Human Papillomavirus
PTGNNKRRK

SEQ ID NO: 33306 - protein, 8 aa, Artificial Sequence
  Peptide Derived from Human Papillomavirus
PVNPLLGA

SEQ ID NO: 33307 - protein, 9 aa, Artificial Sequence
  Peptide Derived from Human Papillomavirus
PVNPLLGAA

SEQ ID NO: 33308 - protein, 8 aa, Artificial Sequence
  Peptide Derived from Human Papillomavirus
QDKIIDHY

SEQ ID NO: 33309 - protein, 8 aa, Artificial Sequence
  Peptide Derived from Human Papillomavirus
QGLAQSRY

SEQ ID NO: 33310 - protein, 9 aa, Artificial Sequence
  Peptide Derived from Human Papillomavirus
QGLAQSRYK

SEQ ID NO: 33311 - protein, 9 aa, Artificial Sequence
  Peptide Derived from Human Papillomavirus
QIQYWQLIR

SEQ ID NO: 33312 - protein, 8 aa, Artificial Sequence
  Peptide Derived from Human Papillomavirus
QLIRWENA

SEQ ID NO: 33313 - protein, 10 aa, Artificial Sequence
  Peptide Derived from Human Papillomavirus
QLIRWENAIF

SEQ ID NO: 33314 - protein, 11 aa, Artificial Sequence
  Peptide Derived from Human Papillomavirus
QLIRWENAIFF

SEQ ID NO: 33315 - protein, 9 aa, Artificial Sequence
  Peptide Derived from Human Papillomavirus
QLQHTPSPY

SEQ ID NO: 33316 - protein, 8 aa, Artificial Sequence
  Peptide Derived from Human Papillomavirus
QLVKQLQH

SEQ ID NO: 33317 - protein, 8 aa, Artificial Sequence
  Peptide Derived from Human Papillomavirus
QMALQGLA

SEQ ID NO: 33318 - protein, 11 aa, Artificial Sequence
  Peptide Derived from Human Papillomavirus
QMALQGLAQSR

SEQ ID NO: 33319 - protein, 10 aa, Artificial Sequence
  Peptide Derived from Human Papillomavirus
QTLNHQVVPA

SEQ ID NO: 33320 - protein, 11 aa, Artificial Sequence
  Peptide Derived from Human Papillomavirus
QTLNHQVVPAY

SEQ ID NO: 33321 - protein, 10 aa, Artificial Sequence
  Peptide Derived from Human Papillomavirus
QTPKETLSER

SEQ ID NO: 33322 - protein, 10 aa, Artificial Sequence
  Peptide Derived from Human Papillomavirus
QTSAATRPGH

SEQ ID NO: 33323 - protein, 11 aa, Artificial Sequence
  Peptide Derived from Human Papillomavirus
QTVQVYFDGNK

SEQ ID NO: 33324 - protein, 10 aa, Artificial Sequence
  Peptide Derived from Human Papillomavirus
QVVPAYNISK

SEQ ID NO: 33325 - protein, 8 aa, Artificial Sequence
  Peptide Derived from Human Papillomavirus
QVYFDGNK

SEQ ID NO: 33326 - protein, 8 aa, Artificial Sequence
  Peptide Derived from Human Papillomavirus
RDISSTWH

SEQ ID NO: 33327 - protein, 10 aa, Artificial Sequence
  Peptide Derived from Human Papillomavirus
RGLYYVKEGY

SEQ ID NO: 33328 - protein, 8 aa, Artificial Sequence
  Peptide Derived from Human Papillomavirus
RLRKHSDH

SEQ ID NO: 33329 - protein, 9 aa, Artificial Sequence
  Peptide Derived from Human Papillomavirus
RLRKHSDHY

SEQ ID NO: 33330 - protein, 10 aa, Artificial Sequence
  Peptide Derived from Human Papillomavirus
RLRKHSDHYR

SEQ ID NO: 33331 - protein, 8 aa, Artificial Sequence
  Peptide Derived from Human Papillomavirus
RLSCVQDK

SEQ ID NO: 33332 - protein, 9 aa, Artificial Sequence
  Peptide Derived from Human Papillomavirus
RTKFLNTVA

SEQ ID NO: 33333 - protein, 8 aa, Artificial Sequence
  Peptide Derived from Human Papillomavirus
SAATRPGH

SEQ ID NO: 33334 - protein, 11 aa, Artificial Sequence
  Peptide Derived from Human Papillomavirus
SATQLVKQLQH

SEQ ID NO: 33335 - protein, 10 aa, Artificial Sequence
  Peptide Derived from Human Papillomavirus
SCVQDKIIDH

SEQ ID NO: 33336 - protein, 11 aa, Artificial Sequence
  Peptide Derived from Human Papillomavirus
SCVQDKIIDHY

SEQ ID NO: 33337 - protein, 9 aa, Artificial Sequence
  Peptide Derived from Human Papillomavirus
SGNTTPIIH

SEQ ID NO: 33338 - protein, 11 aa, Artificial Sequence
  Peptide Derived from Human Papillomavirus
SGNTTPIIHLK

SEQ ID NO: 33339 - protein, 8 aa, Artificial Sequence
  Peptide Derived from Human Papillomavirus
SLKCLRYR

SEQ ID NO: 33340 - protein, 10 aa, Artificial Sequence
  Peptide Derived from Human Papillomavirus
SLKCLRYRLR

SEQ ID NO: 33341 - protein, 11 aa, Artificial Sequence
  Peptide Derived from Human Papillomavirus
SLKCLRYRLRK

SEQ ID NO: 33342 - protein, 9 aa, Artificial Sequence
  Peptide Derived from Human Papillomavirus
SSTVSVGTA

SEQ ID NO: 33343 - protein, 10 aa, Artificial Sequence
  Peptide Derived from Human Papillomavirus
SSTVSVGTAK

SEQ ID NO: 33344 - protein, 9 aa, Artificial Sequence
  Peptide Derived from Human Papillomavirus
SSTWHWTGA

SEQ ID NO: 33345 - protein, 9 aa, Artificial Sequence
  Peptide Derived from Human Papillomavirus
STSDDTVSA

SEQ ID NO: 33346 - protein, 8 aa, Artificial Sequence
  Peptide Derived from Human Papillomavirus
STVSVGTA

SEQ ID NO: 33347 - protein, 9 aa, Artificial Sequence
  Peptide Derived from Human Papillomavirus
STVSVGTAK

SEQ ID NO: 33348 - protein, 11 aa, Artificial Sequence
  Peptide Derived from Human Papillomavirus
STVSVGTAKTY

SEQ ID NO: 33349 - protein, 8 aa, Artificial Sequence
  Peptide Derived from Human Papillomavirus
STWHWTGA

SEQ ID NO: 33350 - protein, 8 aa, Artificial Sequence
  Peptide Derived from Human Papillomavirus
SVGTAKTY

SEQ ID NO: 33351 - protein, 8 aa, Artificial Sequence
  Peptide Derived from Human Papillomavirus
SVQILVGY

SEQ ID NO: 33352 - protein, 8 aa, Artificial Sequence
  Peptide Derived from Human Papillomavirus
SVYYMTDA

SEQ ID NO: 33353 - protein, 10 aa, Artificial Sequence
  Peptide Derived from Human Papillomavirus
TAKTYGQTSA

SEQ ID NO: 33354 - protein, 11 aa, Artificial Sequence
  Peptide Derived from Human Papillomavirus
TAKTYGQTSAA

SEQ ID NO: 33355 - protein, 8 aa, Artificial Sequence
  Peptide Derived from Human Papillomavirus
TATCVSHR

SEQ ID NO: 33356 - protein, 11 aa, Artificial Sequence
  Peptide Derived from Human Papillomavirus
TATCVSHRGLY

SEQ ID NO: 33357 - protein, 9 aa, Artificial Sequence
  Peptide Derived from Human Papillomavirus
TCVSHRGLY

SEQ ID NO: 33358 - protein, 10 aa, Artificial Sequence
  Peptide Derived from Human Papillomavirus
TCVSHRGLYY

SEQ ID NO: 33359 - protein, 8 aa, Artificial Sequence
  Peptide Derived from Human Papillomavirus
TDAGTWDK

SEQ ID NO: 33360 - protein, 10 aa, Artificial Sequence
  Peptide Derived from Human Papillomavirus
TDAGTWDKTA

SEQ ID NO: 33361 - protein, 8 aa, Artificial Sequence
  Peptide Derived from Human Papillomavirus
TGILTVTY

SEQ ID NO: 33362 - protein, 9 aa, Artificial Sequence
  Peptide Derived from Human Papillomavirus
TGILTVTYH

SEQ ID NO: 33363 - protein, 8 aa, Artificial Sequence
  Peptide Derived from Human Papillomavirus
TGNNKRRK

SEQ ID NO: 33364 - protein, 8 aa, Artificial Sequence
  Peptide Derived from Human Papillomavirus
TGTWEVHF

SEQ ID NO: 33365 - protein, 9 aa, Artificial Sequence
  Peptide Derived from Human Papillomavirus
TLNHQVVPA

SEQ ID NO: 33366 - protein, 10 aa, Artificial Sequence
  Peptide Derived from Human Papillomavirus
TLNHQVVPAY

SEQ ID NO: 33367 - protein, 9 aa, Artificial Sequence
  Peptide Derived from Human Papillomavirus
TSAATRPGH

SEQ ID NO: 33368 - protein, 8 aa, Artificial Sequence
  Peptide Derived from Human Papillomavirus
TSDDTVSA

SEQ ID NO: 33369 - protein, 8 aa, Artificial Sequence
  Peptide Derived from Human Papillomavirus
TTPIIHLK

SEQ ID NO: 33370 - protein, 11 aa, Artificial Sequence
  Peptide Derived from Human Papillomavirus
TTPIIHLKGDR

SEQ ID NO: 33371 - protein, 10 aa, Artificial Sequence
  Peptide Derived from Human Papillomavirus
TVQVYFDGNK

SEQ ID NO: 33372 - protein, 9 aa, Artificial Sequence
  Peptide Derived from Human Papillomavirus
TVSATQLVK

SEQ ID NO: 33373 - protein, 8 aa, Artificial Sequence
  Peptide Derived from Human Papillomavirus
TVSVGTAK

SEQ ID NO: 33374 - protein, 10 aa, Artificial Sequence
  Peptide Derived from Human Papillomavirus
TVSVGTAKTY

SEQ ID NO: 33375 - protein, 10 aa, Artificial Sequence
  Peptide Derived from Human Papillomavirus
TVTYHSETQR

SEQ ID NO: 33376 - protein, 8 aa, Artificial Sequence
  Peptide Derived from Human Papillomavirus
VAWDSVYY

SEQ ID NO: 33377 - protein, 8 aa, Artificial Sequence
  Peptide Derived from Human Papillomavirus
VSATQLVK

SEQ ID NO: 33378 - protein, 8 aa, Artificial Sequence
  Peptide Derived from Human Papillomavirus
VSHRGLYY

SEQ ID NO: 33379 - protein, 10 aa, Artificial Sequence
  Peptide Derived from Human Papillomavirus
VSHRGLYYVK

SEQ ID NO: 33380 - protein, 9 aa, Artificial Sequence
  Peptide Derived from Human Papillomavirus
VSVGTAKTY

SEQ ID NO: 33381 - protein, 9 aa, Artificial Sequence
  Peptide Derived from Human Papillomavirus
VTYHSETQR

SEQ ID NO: 33382 - protein, 11 aa, Artificial Sequence
  Peptide Derived from Human Papillomavirus
VTYHSETQRTK

SEQ ID NO: 33383 - protein, 9 aa, Artificial Sequence
  Peptide Derived from Human Papillomavirus
VVPAYNISK

SEQ ID NO: 33384 - protein, 11 aa, Artificial Sequence
  Peptide Derived from Human Papillomavirus
VVPAYNISKSK

SEQ ID NO: 33385 - protein, 10 aa, Artificial Sequence
  Peptide Derived from Human Papillomavirus
WDKTATCVSH

SEQ ID NO: 33386 - protein, 11 aa, Artificial Sequence
  Peptide Derived from Human Papillomavirus
WDKTATCVSHR

SEQ ID NO: 33387 - protein, 10 aa, Artificial Sequence
  Peptide Derived from Human Papillomavirus
WDSVYYMTDA

SEQ ID NO: 33388 - protein, 8 aa, Artificial Sequence
  Peptide Derived from Human Papillomavirus
WTGAGNEK

SEQ ID NO: 33389 - protein, 10 aa, Artificial Sequence
  Peptide Derived from Human Papillomavirus
YGNTGTWEVH

SEQ ID NO: 33390 - protein, 11 aa, Artificial Sequence
  Peptide Derived from Human Papillomavirus
YGNTGTWEVHF

SEQ ID NO: 33391 - protein, 9 aa, Artificial Sequence
  Peptide Derived from Human Papillomavirus
YGQTSAATR

SEQ ID NO: 33392 - protein, 10 aa, Artificial Sequence
  Peptide Derived from Human Papillomavirus
YIEFKSECEK

SEQ ID NO: 33393 - protein, 11 aa, Artificial Sequence
  Peptide Derived from Human Papillomavirus
YIEFKSECEKY

SEQ ID NO: 33394 - protein, 10 aa, Artificial Sequence
  Peptide Derived from Human Papillomavirus
YMTDAGTWDK

SEQ ID NO: 33395 - protein, 10 aa, Artificial Sequence
  Peptide Derived from Human Papillomavirus
YSSTVSVGTA

SEQ ID NO: 33396 - protein, 11 aa, Artificial Sequence
  Peptide Derived from Human Papillomavirus
YSSTVSVGTAK

SEQ ID NO: 33397 - protein, 8 aa, Artificial Sequence
  Peptide Derived from Human Papillomavirus
YVAWDSVY

SEQ ID NO: 33398 - protein, 9 aa, Artificial Sequence
  Peptide Derived from Human Papillomavirus
YVAWDSVYY

SEQ ID NO: 33399 - protein, 9 aa, Artificial Sequence
  Peptide Derived from Human Papillomavirus
YVKEGYNTF

SEQ ID NO: 33400 - protein, 10 aa, Artificial Sequence
  Peptide Derived from Human Papillomavirus
YVKEGYNTFY

SEQ ID NO: 33401 - protein, 9 aa, Artificial Sequence
  Peptide Derived from Human Papillomavirus
AFTVYVFCF

SEQ ID NO: 33402 - protein, 9 aa, Artificial Sequence
  Peptide Derived from Human Papillomavirus
ATAFTVYVF

SEQ ID NO: 33403 - protein, 11 aa, Artificial Sequence
  Peptide Derived from Human Papillomavirus
ATAFTVYVFCF

SEQ ID NO: 33404 - protein, 9 aa, Artificial Sequence
  Peptide Derived from Human Papillomavirus
CAYAWVLVF

SEQ ID NO: 33405 - protein, 11 aa, Artificial Sequence
  Peptide Derived from Human Papillomavirus
CAYAWVLVFVY

SEQ ID NO: 33406 - protein, 11 aa, Artificial Sequence
  Peptide Derived from Human Papillomavirus
CFCVCMYVCCH

SEQ ID NO: 33407 - protein, 10 aa, Artificial Sequence
  Peptide Derived from Human Papillomavirus
CFLLPMLLLH

SEQ ID NO: 33408 - protein, 11 aa, Artificial Sequence
  Peptide Derived from Human Papillomavirus
CMCAYAWVLVF

SEQ ID NO: 33409 - protein, 9 aa, Artificial Sequence
  Peptide Derived from Human Papillomavirus
CVCMYVCCH

SEQ ID NO: 33410 - protein, 8 aa, Artificial Sequence
  Peptide Derived from Human Papillomavirus
FCFCVCMY

SEQ ID NO: 33411 - protein, 11 aa, Artificial Sequence
  Peptide Derived from Human Papillomavirus
FCFLLPMLLLH

SEQ ID NO: 33412 - protein, 10 aa, Artificial Sequence
  Peptide Derived from Human Papillomavirus
FCVCMYVCCH

SEQ ID NO: 33413 - protein, 10 aa, Artificial Sequence
  Peptide Derived from Human Papillomavirus
FLFCFCVCMY

SEQ ID NO: 33414 - protein, 9 aa, Artificial Sequence
  Peptide Derived from Human Papillomavirus
FLLPMLLLH

SEQ ID NO: 33415 - protein, 11 aa, Artificial Sequence
  Peptide Derived from Human Papillomavirus
FLLPMLLLHIH

SEQ ID NO: 33416 - protein, 8 aa, Artificial Sequence
  Peptide Derived from Human Papillomavirus
FTVYVFCF

SEQ ID NO: 33417 - protein, 11 aa, Artificial Sequence
  Peptide Derived from Human Papillomavirus
FVYIVVITSPA

SEQ ID NO: 33418 - protein, 11 aa, Artificial Sequence
  Peptide Derived from Human Papillomavirus
IFLFCFCVCMY

SEQ ID NO: 33419 - protein, 8 aa, Artificial Sequence
  Peptide Derived from Human Papillomavirus
ITSPATAF

SEQ ID NO: 33420 - protein, 11 aa, Artificial Sequence
  Peptide Derived from Human Papillomavirus
ITSPATAFTVY

SEQ ID NO: 33421 - protein, 8 aa, Artificial Sequence
  Peptide Derived from Human Papillomavirus
IVVITSPA

SEQ ID NO: 33422 - protein, 10 aa, Artificial Sequence
  Peptide Derived from Human Papillomavirus
IVVITSPATA

SEQ ID NO: 33423 - protein, 11 aa, Artificial Sequence
  Peptide Derived from Human Papillomavirus
IVVITSPATAF

SEQ ID NO: 33424 - protein, 9 aa, Artificial Sequence
  Peptide Derived from Human Papillomavirus
LFCFCVCMY

SEQ ID NO: 33425 - protein, 8 aa, Artificial Sequence
  Peptide Derived from Human Papillomavirus
LLPMLLLH

SEQ ID NO: 33426 - protein, 10 aa, Artificial Sequence
  Peptide Derived from Human Papillomavirus
LLPMLLLHIH

SEQ ID NO: 33427 - protein, 11 aa, Artificial Sequence
  Peptide Derived from Human Papillomavirus
LLPMLLLHIHA

SEQ ID NO: 33428 - protein, 9 aa, Artificial Sequence
  Peptide Derived from Human Papillomavirus
LLPSVCMCA

SEQ ID NO: 33429 - protein, 10 aa, Artificial Sequence
  Peptide Derived from Human Papillomavirus
LLPSVCMCAY

SEQ ID NO: 33430 - protein, 11 aa, Artificial Sequence
  Peptide Derived from Human Papillomavirus
LLPSVCMCAYA

SEQ ID NO: 33431 - protein, 9 aa, Artificial Sequence
  Peptide Derived from Human Papillomavirus
LSLIFLFCF

SEQ ID NO: 33432 - protein, 10 aa, Artificial Sequence
  Peptide Derived from Human Papillomavirus
MCAYAWVLVF

SEQ ID NO: 33433 - protein, 8 aa, Artificial Sequence
  Peptide Derived from Human Papillomavirus
MLLLHIHA

SEQ ID NO: 33434 - protein, 8 aa, Artificial Sequence
  Peptide Derived from Human Papillomavirus
MLSLIFLF

SEQ ID NO: 33435 - protein, 10 aa, Artificial Sequence
  Peptide Derived from Human Papillomavirus
MLSLIFLFCF

SEQ ID NO: 33436 - protein, 8 aa, Artificial Sequence
  Peptide Derived from Human Papillomavirus
PATAFTVY

SEQ ID NO: 33437 - protein, 10 aa, Artificial Sequence
  Peptide Derived from Human Papillomavirus
PATAFTVYVF

SEQ ID NO: 33438 - protein, 10 aa, Artificial Sequence
  Peptide Derived from Human Papillomavirus
PLLPSVCMCA

SEQ ID NO: 33439 - protein, 11 aa, Artificial Sequence
  Peptide Derived from Human Papillomavirus
PLLPSVCMCAY

SEQ ID NO: 33440 - protein, 8 aa, Artificial Sequence
  Peptide Derived from Human Papillomavirus
PMLLLHIH

SEQ ID NO: 33441 - protein, 9 aa, Artificial Sequence
  Peptide Derived from Human Papillomavirus
PMLLLHIHA

SEQ ID NO: 33442 - protein, 8 aa, Artificial Sequence
  Peptide Derived from Human Papillomavirus
PSVCMCAY

SEQ ID NO: 33443 - protein, 9 aa, Artificial Sequence
  Peptide Derived from Human Papillomavirus
PSVCMCAYA

SEQ ID NO: 33444 - protein, 8 aa, Artificial Sequence
  Peptide Derived from Human Papillomavirus
SLIFLFCF

SEQ ID NO: 33445 - protein, 8 aa, Artificial Sequence
  Peptide Derived from Human Papillomavirus
SVCMCAYA

SEQ ID NO: 33446 - protein, 8 aa, Artificial Sequence
  Peptide Derived from Human Papillomavirus
TAFTVYVF

SEQ ID NO: 33447 - protein, 10 aa, Artificial Sequence
  Peptide Derived from Human Papillomavirus
TAFTVYVFCF

SEQ ID NO: 33448 - protein, 10 aa, Artificial Sequence
  Peptide Derived from Human Papillomavirus
TSPATAFTVY

SEQ ID NO: 33449 - protein, 8 aa, Artificial Sequence
  Peptide Derived from Human Papillomavirus
VCMYVCCH

SEQ ID NO: 33450 - protein, 8 aa, Artificial Sequence
  Peptide Derived from Human Papillomavirus
VITSPATA

SEQ ID NO: 33451 - protein, 9 aa, Artificial Sequence
  Peptide Derived from Human Papillomavirus
VITSPATAF

SEQ ID NO: 33452 - protein, 9 aa, Artificial Sequence
  Peptide Derived from Human Papillomavirus
VVITSPATA

SEQ ID NO: 33453 - protein, 10 aa, Artificial Sequence
  Peptide Derived from Human Papillomavirus
VVITSPATAF

SEQ ID NO: 33454 - protein, 9 aa, Artificial Sequence
  Peptide Derived from Human Papillomavirus
YAWVLVFVY

SEQ ID NO: 33455 - protein, 9 aa, Artificial Sequence
  Peptide Derived from Human Papillomavirus
YIVVITSPA

SEQ ID NO: 33456 - protein, 11 aa, Artificial Sequence
  Peptide Derived from Human Papillomavirus
YIVVITSPATA

SEQ ID NO: 33457 - protein, 9 aa, Artificial Sequence
  Peptide Derived from Human Papillomavirus
AACHKCIDF

SEQ ID NO: 33458 - protein, 10 aa, Artificial Sequence
  Peptide Derived from Human Papillomavirus
AACHKCIDFY

SEQ ID NO: 33459 - protein, 8 aa, Artificial Sequence
  Peptide Derived from Human Papillomavirus
ACHKCIDF

SEQ ID NO: 33460 - protein, 9 aa, Artificial Sequence
  Peptide Derived from Human Papillomavirus
ACHKCIDFY

SEQ ID NO: 33461 - protein, 11 aa, Artificial Sequence
  Peptide Derived from Human Papillomavirus
ACHKCIDFYSR

SEQ ID NO: 33462 - protein, 9 aa, Artificial Sequence
  Peptide Derived from Human Papillomavirus
AFKDLFVVY

SEQ ID NO: 33463 - protein, 10 aa, Artificial Sequence
  Peptide Derived from Human Papillomavirus
AFKDLFVVYR

SEQ ID NO: 33464 - protein, 9 aa, Artificial Sequence
  Peptide Derived from Human Papillomavirus
AGHYRGQCH

SEQ ID NO: 33465 - protein, 9 aa, Artificial Sequence
  Peptide Derived from Human Papillomavirus
CCNRARQER

SEQ ID NO: 33466 - protein, 9 aa, Artificial Sequence
  Peptide Derived from Human Papillomavirus
CIDFYSRIR

SEQ ID NO: 33467 - protein, 11 aa, Artificial Sequence
  Peptide Derived from Human Papillomavirus
CLRCQKPLNPA

SEQ ID NO: 33468 - protein, 10 aa, Artificial Sequence
  Peptide Derived from Human Papillomavirus
DFYSRIRELR

SEQ ID NO: 33469 - protein, 11 aa, Artificial Sequence
  Peptide Derived from Human Papillomavirus
DFYSRIRELRH

SEQ ID NO: 33470 - protein, 8 aa, Artificial Sequence
  Peptide Derived from Human Papillomavirus
DIEITCVY

SEQ ID NO: 33471 - protein, 10 aa, Artificial Sequence
  Peptide Derived from Human Papillomavirus
DIEITCVYCK

SEQ ID NO: 33472 - protein, 9 aa, Artificial Sequence
  Peptide Derived from Human Papillomavirus
DSIPHAACH

SEQ ID NO: 33473 - protein, 10 aa, Artificial Sequence
  Peptide Derived from Human Papillomavirus
DSIPHAACHK

SEQ ID NO: 33474 - protein, 10 aa, Artificial Sequence
  Peptide Derived from Human Papillomavirus
DSVYGDTLEK

SEQ ID NO: 33475 - protein, 8 aa, Artificial Sequence
  Peptide Derived from Human Papillomavirus
EDPTRRPY

SEQ ID NO: 33476 - protein, 9 aa, Artificial Sequence
  Peptide Derived from Human Papillomavirus
EDPTRRPYK

SEQ ID NO: 33477 - protein, 8 aa, Artificial Sequence
  Peptide Derived from Human Papillomavirus
EFAFKDLF

SEQ ID NO: 33478 - protein, 11 aa, Artificial Sequence
  Peptide Derived from Human Papillomavirus
EFAFKDLFVVY

SEQ ID NO: 33479 - protein, 8 aa, Artificial Sequence
  Peptide Derived from Human Papillomavirus
EITCVYCK

SEQ ID NO: 33480 - protein, 10 aa, Artificial Sequence
  Peptide Derived from Human Papillomavirus
ELRHYSDSVY

SEQ ID NO: 33481 - protein, 8 aa, Artificial Sequence
  Peptide Derived from Human Papillomavirus
ELTEVFEF

SEQ ID NO: 33482 - protein, 9 aa, Artificial Sequence
  Peptide Derived from Human Papillomavirus
ELTEVFEFA

SEQ ID NO: 33483 - protein, 10 aa, Artificial Sequence
  Peptide Derived from Human Papillomavirus
ELTEVFEFAF

SEQ ID NO: 33484 - protein, 11 aa, Artificial Sequence
  Peptide Derived from Human Papillomavirus
ELTEVFEFAFK

SEQ ID NO: 33485 - protein, 8 aa, Artificial Sequence
  Peptide Derived from Human Papillomavirus
EVFEFAFK

SEQ ID NO: 33486 - protein, 11 aa, Artificial Sequence
  Peptide Derived from Human Papillomavirus
EVFEFAFKDLF

SEQ ID NO: 33487 - protein, 10 aa, Artificial Sequence
  Peptide Derived from Human Papillomavirus
FAFKDLFVVY

SEQ ID NO: 33488 - protein, 11 aa, Artificial Sequence
  Peptide Derived from Human Papillomavirus
FAFKDLFVVYR

SEQ ID NO: 33489 - protein, 10 aa, Artificial Sequence
  Peptide Derived from Human Papillomavirus
FVVYRDSIPH

SEQ ID NO: 33490 - protein, 11 aa, Artificial Sequence
  Peptide Derived from Human Papillomavirus
FVVYRDSIPHA

SEQ ID NO: 33491 - protein, 8 aa, Artificial Sequence
  Peptide Derived from Human Papillomavirus
GLYNLLIR

SEQ ID NO: 33492 - protein, 11 aa, Artificial Sequence
  Peptide Derived from Human Papillomavirus
GLYNLLIRCLR

SEQ ID NO: 33493 - protein, 10 aa, Artificial Sequence
  Peptide Derived from Human Papillomavirus
HAACHKCIDF

SEQ ID NO: 33494 - protein, 11 aa, Artificial Sequence
  Peptide Derived from Human Papillomavirus
HAACHKCIDFY

SEQ ID NO: 33495 - protein, 8 aa, Artificial Sequence
  Peptide Derived from Human Papillomavirus
HLNEKRRF

SEQ ID NO: 33496 - protein, 9 aa, Artificial Sequence
  Peptide Derived from Human Papillomavirus
HLNEKRRFH

SEQ ID NO: 33497 - protein, 8 aa, Artificial Sequence
  Peptide Derived from Human Papillomavirus
HSCCNRAR

SEQ ID NO: 33498 - protein, 11 aa, Artificial Sequence
  Peptide Derived from Human Papillomavirus
HSCCNRARQER

SEQ ID NO: 33499 - protein, 10 aa, Artificial Sequence
  Peptide Derived from Human Papillomavirus
IAGHYRGQCH

SEQ ID NO: 33500 - protein, 8 aa, Artificial Sequence
  Peptide Derived from Human Papillomavirus
IDFYSRIR

SEQ ID NO: 33501 - protein, 11 aa, Artificial Sequence
  Peptide Derived from Human Papillomavirus
IDFYSRIRELR

SEQ ID NO: 33502 - protein, 8 aa, Artificial Sequence
  Peptide Derived from Human Papillomavirus
KCIDFYSR

SEQ ID NO: 33503 - protein, 10 aa, Artificial Sequence
  Peptide Derived from Human Papillomavirus
KCIDFYSRIR

SEQ ID NO: 33504 - protein, 8 aa, Artificial Sequence
  Peptide Derived from Human Papillomavirus
KDLFVVYR

SEQ ID NO: 33505 - protein, 8 aa, Artificial Sequence
  Peptide Derived from Human Papillomavirus
KLRHLNEK

SEQ ID NO: 33506 - protein, 9 aa, Artificial Sequence
  Peptide Derived from Human Papillomavirus
KLRHLNEKR

SEQ ID NO: 33507 - protein, 10 aa, Artificial Sequence
  Peptide Derived from Human Papillomavirus
KLRHLNEKRR

SEQ ID NO: 33508 - protein, 11 aa, Artificial Sequence
  Peptide Derived from Human Papillomavirus
KLRHLNEKRRF

SEQ ID NO: 33509 - protein, 8 aa, Artificial Sequence
  Peptide Derived from Human Papillomavirus
KLTNTGLY

SEQ ID NO: 33510 - protein, 10 aa, Artificial Sequence
  Peptide Derived from Human Papillomavirus
KTVLELTEVF

SEQ ID NO: 33511 - protein, 11 aa, Artificial Sequence
  Peptide Derived from Human Papillomavirus
LFVVYRDSIPH

SEQ ID NO: 33512 - protein, 9 aa, Artificial Sequence
  Peptide Derived from Human Papillomavirus
LIRCLRCQK

SEQ ID NO: 33513 - protein, 10 aa, Artificial Sequence
  Peptide Derived from Human Papillomavirus
LLIRCLRCQK

SEQ ID NO: 33514 - protein, 8 aa, Artificial Sequence
  Peptide Derived from Human Papillomavirus
LTEVFEFA

SEQ ID NO: 33515 - protein, 9 aa, Artificial Sequence
  Peptide Derived from Human Papillomavirus
LTEVFEFAF

SEQ ID NO: 33516 - protein, 10 aa, Artificial Sequence
  Peptide Derived from Human Papillomavirus
LTEVFEFAFK

SEQ ID NO: 33517 - protein, 9 aa, Artificial Sequence
  Peptide Derived from Human Papillomavirus
MARFEDPTR

SEQ ID NO: 33518 - protein, 10 aa, Artificial Sequence
  Peptide Derived from Human Papillomavirus
MARFEDPTRR

SEQ ID NO: 33519 - protein, 11 aa, Artificial Sequence
  Peptide Derived from Human Papillomavirus
NIAGHYRGQCH

SEQ ID NO: 33520 - protein, 8 aa, Artificial Sequence
  Peptide Derived from Human Papillomavirus
NLLIRCLR

SEQ ID NO: 33521 - protein, 11 aa, Artificial Sequence
  Peptide Derived from Human Papillomavirus
NLLIRCLRCQK

SEQ ID NO: 33522 - protein, 10 aa, Artificial Sequence
  Peptide Derived from Human Papillomavirus
NTGLYNLLIR

SEQ ID NO: 33523 - protein, 11 aa, Artificial Sequence
  Peptide Derived from Human Papillomavirus
PAEKLRHLNEK

SEQ ID NO: 33524 - protein, 9 aa, Artificial Sequence
  Peptide Derived from Human Papillomavirus
PLNPAEKLR

SEQ ID NO: 33525 - protein, 10 aa, Artificial Sequence
  Peptide Derived from Human Papillomavirus
PLNPAEKLRH

SEQ ID NO: 33526 - protein, 8 aa, Artificial Sequence
  Peptide Derived from Human Papillomavirus
QCHSCCNR

SEQ ID NO: 33527 - protein, 9 aa, Artificial Sequence
  Peptide Derived from Human Papillomavirus
QCHSCCNRA

SEQ ID NO: 33528 - protein, 10 aa, Artificial Sequence
  Peptide Derived from Human Papillomavirus
QCHSCCNRAR

SEQ ID NO: 33529 - protein, 9 aa, Artificial Sequence
  Peptide Derived from Human Papillomavirus
QDIEITCVY

SEQ ID NO: 33530 - protein, 11 aa, Artificial Sequence
  Peptide Derived from Human Papillomavirus
QDIEITCVYCK

SEQ ID NO: 33531 - protein, 9 aa, Artificial Sequence
  Peptide Derived from Human Papillomavirus
RARQERLQR

SEQ ID NO: 33532 - protein, 10 aa, Artificial Sequence
  Peptide Derived from Human Papillomavirus
RARQERLQRR

SEQ ID NO: 33533 - protein, 11 aa, Artificial Sequence
  Peptide Derived from Human Papillomavirus
RARQERLQRRR

SEQ ID NO: 33534 - protein, 9 aa, Artificial Sequence
  Peptide Derived from Human Papillomavirus
RCQKPLNPA

SEQ ID NO: 33535 - protein, 11 aa, Artificial Sequence
  Peptide Derived from Human Papillomavirus
RCQKPLNPAEK

SEQ ID NO: 33536 - protein, 8 aa, Artificial Sequence
  Peptide Derived from Human Papillomavirus
RDSIPHAA

SEQ ID NO: 33537 - protein, 10 aa, Artificial Sequence
  Peptide Derived from Human Papillomavirus
RDSIPHAACH

SEQ ID NO: 33538 - protein, 11 aa, Artificial Sequence
  Peptide Derived from Human Papillomavirus
RDSIPHAACHK

SEQ ID NO: 33539 - protein, 8 aa, Artificial Sequence
  Peptide Derived from Human Papillomavirus
RFEDPTRR

SEQ ID NO: 33540 - protein, 10 aa, Artificial Sequence
  Peptide Derived from Human Papillomavirus
RFEDPTRRPY

SEQ ID NO: 33541 - protein, 11 aa, Artificial Sequence
  Peptide Derived from Human Papillomavirus
RFEDPTRRPYK

SEQ ID NO: 33542 - protein, 8 aa, Artificial Sequence
  Peptide Derived from Human Papillomavirus
RFHNIAGH

SEQ ID NO: 33543 - protein, 9 aa, Artificial Sequence
  Peptide Derived from Human Papillomavirus
RFHNIAGHY

SEQ ID NO: 33544 - protein, 10 aa, Artificial Sequence
  Peptide Derived from Human Papillomavirus
RFHNIAGHYR

SEQ ID NO: 33545 - protein, 10 aa, Artificial Sequence
  Peptide Derived from Human Papillomavirus
RGQCHSCCNR

SEQ ID NO: 33546 - protein, 11 aa, Artificial Sequence
  Peptide Derived from Human Papillomavirus
RGQCHSCCNRA

SEQ ID NO: 33547 - protein, 8 aa, Artificial Sequence
  Peptide Derived from Human Papillomavirus
RIRELRHY

SEQ ID NO: 33548 - protein, 10 aa, Artificial Sequence
  Peptide Derived from Human Papillomavirus
SCCNRARQER

SEQ ID NO: 33549 - protein, 11 aa, Artificial Sequence
  Peptide Derived from Human Papillomavirus
SDSVYGDTLEK

SEQ ID NO: 33550 - protein, 8 aa, Artificial Sequence
  Peptide Derived from Human Papillomavirus
SIPHAACH

SEQ ID NO: 33551 - protein, 9 aa, Artificial Sequence
  Peptide Derived from Human Papillomavirus
SIPHAACHK

SEQ ID NO: 33552 - protein, 11 aa, Artificial Sequence
  Peptide Derived from Human Papillomavirus
SLQDIEITCVY

SEQ ID NO: 33553 - protein, 9 aa, Artificial Sequence
  Peptide Derived from Human Papillomavirus
SVYGDTLEK

SEQ ID NO: 33554 - protein, 9 aa, Artificial Sequence
  Peptide Derived from Human Papillomavirus
TGLYNLLIR

SEQ ID NO: 33555 - protein, 11 aa, Artificial Sequence
  Peptide Derived from Human Papillomavirus
TLEKLTNTGLY

SEQ ID NO: 33556 - protein, 9 aa, Artificial Sequence
  Peptide Derived from Human Papillomavirus
TVLELTEVF

SEQ ID NO: 33557 - protein, 11 aa, Artificial Sequence
  Peptide Derived from Human Papillomavirus
TVLELTEVFEF

SEQ ID NO: 33558 - protein, 10 aa, Artificial Sequence
  Peptide Derived from Human Papillomavirus
VFEFAFKDLF

SEQ ID NO: 33559 - protein, 8 aa, Artificial Sequence
  Peptide Derived from Human Papillomavirus
VLELTEVF

SEQ ID NO: 33560 - protein, 10 aa, Artificial Sequence
  Peptide Derived from Human Papillomavirus
VLELTEVFEF

SEQ ID NO: 33561 - protein, 11 aa, Artificial Sequence
  Peptide Derived from Human Papillomavirus
VLELTEVFEFA

SEQ ID NO: 33562 - protein, 9 aa, Artificial Sequence
  Peptide Derived from Human Papillomavirus
VVYRDSIPH

SEQ ID NO: 33563 - protein, 10 aa, Artificial Sequence
  Peptide Derived from Human Papillomavirus
VVYRDSIPHA

SEQ ID NO: 33564 - protein, 11 aa, Artificial Sequence
  Peptide Derived from Human Papillomavirus
VVYRDSIPHAA

SEQ ID NO: 33565 - protein, 8 aa, Artificial Sequence
  Peptide Derived from Human Papillomavirus
YSRIRELR

SEQ ID NO: 33566 - protein, 9 aa, Artificial Sequence
  Peptide Derived from Human Papillomavirus
YSRIRELRH

SEQ ID NO: 33567 - protein, 10 aa, Artificial Sequence
  Peptide Derived from Human Papillomavirus
YSRIRELRHY

SEQ ID NO: 33568 - protein, 11 aa, Artificial Sequence
  Peptide Derived from Human Papillomavirus
ADDLRAFQQLF

SEQ ID NO: 33569 - protein, 9 aa, Artificial Sequence
  Peptide Derived from Human Papillomavirus
ATLQDIVLH

SEQ ID NO: 33570 - protein, 9 aa, Artificial Sequence
  Peptide Derived from Human Papillomavirus
CCKCEARIK

SEQ ID NO: 33571 - protein, 8 aa, Artificial Sequence
  Peptide Derived from Human Papillomavirus
CMCCKCEA

SEQ ID NO: 33572 - protein, 9 aa, Artificial Sequence
  Peptide Derived from Human Papillomavirus
CMCCKCEAR

SEQ ID NO: 33573 - protein, 11 aa, Artificial Sequence
  Peptide Derived from Human Papillomavirus
CMCCKCEARIK

SEQ ID NO: 33574 - protein, 10 aa, Artificial Sequence
  Peptide Derived from Human Papillomavirus
DDLRAFQQLF

SEQ ID NO: 33575 - protein, 10 aa, Artificial Sequence
  Peptide Derived from Human Papillomavirus
DGVNHQHLPA

SEQ ID NO: 33576 - protein, 11 aa, Artificial Sequence
  Peptide Derived from Human Papillomavirus
DGVNHQHLPAR

SEQ ID NO: 33577 - protein, 9 aa, Artificial Sequence
  Peptide Derived from Human Papillomavirus
DLRAFQQLF

SEQ ID NO: 33578 - protein, 9 aa, Artificial Sequence
  Peptide Derived from Human Papillomavirus
EIDGVNHQH

SEQ ID NO: 33579 - protein, 9 aa, Artificial Sequence
  Peptide Derived from Human Papillomavirus
EIPVDLLCH

SEQ ID NO: 33580 - protein, 8 aa, Artificial Sequence
  Peptide Derived from Human Papillomavirus
ESSADDLR

SEQ ID NO: 33581 - protein, 9 aa, Artificial Sequence
  Peptide Derived from Human Papillomavirus
ESSADDLRA

SEQ ID NO: 33582 - protein, 10 aa, Artificial Sequence
  Peptide Derived from Human Papillomavirus
ESSADDLRAF

SEQ ID NO: 33583 - protein, 9 aa, Artificial Sequence
  Peptide Derived from Human Papillomavirus
GVNHQHLPA

SEQ ID NO: 33584 - protein, 10 aa, Artificial Sequence
  Peptide Derived from Human Papillomavirus
GVNHQHLPAR

SEQ ID NO: 33585 - protein, 11 aa, Artificial Sequence
  Peptide Derived from Human Papillomavirus
GVNHQHLPARR

SEQ ID NO: 33586 - protein, 11 aa, Artificial Sequence
  Peptide Derived from Human Papillomavirus
HLPARRAEPQR

SEQ ID NO: 33587 - protein, 9 aa, Artificial Sequence
  Peptide Derived from Human Papillomavirus
HTMLCMCCK

SEQ ID NO: 33588 - protein, 8 aa, Artificial Sequence
  Peptide Derived from Human Papillomavirus
IDGVNHQH

SEQ ID NO: 33589 - protein, 11 aa, Artificial Sequence
  Peptide Derived from Human Papillomavirus
IDGVNHQHLPA

SEQ ID NO: 33590 - protein, 10 aa, Artificial Sequence
  Peptide Derived from Human Papillomavirus
KATLQDIVLH

SEQ ID NO: 33591 - protein, 8 aa, Artificial Sequence
  Peptide Derived from Human Papillomavirus
KLVVESSA

SEQ ID NO: 33592 - protein, 9 aa, Artificial Sequence
  Peptide Derived from Human Papillomavirus
LCMCCKCEA

SEQ ID NO: 33593 - protein, 10 aa, Artificial Sequence
  Peptide Derived from Human Papillomavirus
LCMCCKCEAR

SEQ ID NO: 33594 - protein, 8 aa, Artificial Sequence
  Peptide Derived from Human Papillomavirus
LFLNTLSF

SEQ ID NO: 33595 - protein, 9 aa, Artificial Sequence
  Peptide Derived from Human Papillomavirus
LSFVCPWCA

SEQ ID NO: 33596 - protein, 11 aa, Artificial Sequence
  Peptide Derived from Human Papillomavirus
LVVESSADDLR

SEQ ID NO: 33597 - protein, 8 aa, Artificial Sequence
  Peptide Derived from Human Papillomavirus
MCCKCEAR

SEQ ID NO: 33598 - protein, 10 aa, Artificial Sequence
  Peptide Derived from Human Papillomavirus
MCCKCEARIK

SEQ ID NO: 33599 - protein, 10 aa, Artificial Sequence
  Peptide Derived from Human Papillomavirus
MLCMCCKCEA

SEQ ID NO: 33600 - protein, 11 aa, Artificial Sequence
  Peptide Derived from Human Papillomavirus
MLCMCCKCEAR

SEQ ID NO: 33601 - protein, 9 aa, Artificial Sequence
  Peptide Derived from Human Papillomavirus
NDEIDGVNH

SEQ ID NO: 33602 - protein, 11 aa, Artificial Sequence
  Peptide Derived from Human Papillomavirus
NDEIDGVNHQH

SEQ ID NO: 33603 - protein, 11 aa, Artificial Sequence
  Peptide Derived from Human Papillomavirus
NTLSFVCPWCA

SEQ ID NO: 33604 - protein, 9 aa, Artificial Sequence
  Peptide Derived from Human Papillomavirus
PARRAEPQR

SEQ ID NO: 33605 - protein, 10 aa, Artificial Sequence
  Peptide Derived from Human Papillomavirus
PARRAEPQRH

SEQ ID NO: 33606 - protein, 9 aa, Artificial Sequence
  Peptide Derived from Human Papillomavirus
QLFLNTLSF

SEQ ID NO: 33607 - protein, 10 aa, Artificial Sequence
  Peptide Derived from Human Papillomavirus
RIKLVVESSA

SEQ ID NO: 33608 - protein, 8 aa, Artificial Sequence
  Peptide Derived from Human Papillomavirus
SADDLRAF

SEQ ID NO: 33609 - protein, 8 aa, Artificial Sequence
  Peptide Derived from Human Papillomavirus
SFVCPWCA

SEQ ID NO: 33610 - protein, 8 aa, Artificial Sequence
  Peptide Derived from Human Papillomavirus
SSADDLRA

SEQ ID NO: 33611 - protein, 9 aa, Artificial Sequence
  Peptide Derived from Human Papillomavirus
SSADDLRAF

SEQ ID NO: 33612 - protein, 8 aa, Artificial Sequence
  Peptide Derived from Human Papillomavirus
TLQDIVLH

SEQ ID NO: 33613 - protein, 10 aa, Artificial Sequence
  Peptide Derived from Human Papillomavirus
TLSFVCPWCA

SEQ ID NO: 33614 - protein, 8 aa, Artificial Sequence
  Peptide Derived from Human Papillomavirus
TMLCMCCK

SEQ ID NO: 33615 - protein, 11 aa, Artificial Sequence
  Peptide Derived from Human Papillomavirus
TMLCMCCKCEA

SEQ ID NO: 33616 - protein, 10 aa, Artificial Sequence
  Peptide Derived from Human Papillomavirus
VVESSADDLR

SEQ ID NO: 33617 - protein, 11 aa, Artificial Sequence
  Peptide Derived from Human Papillomavirus
VVESSADDLRA

SEQ ID NO: 33618 - protein, 10 aa, Artificial Sequence
  Peptide Derived from Human Papillomavirus
AAPAENKDPY

SEQ ID NO: 33619 - protein, 11 aa, Artificial Sequence
  Peptide Derived from Human Papillomavirus
AATSNVSEDVR

SEQ ID NO: 33620 - protein, 9 aa, Artificial Sequence
  Peptide Derived from Human Papillomavirus
ACAGVEIGR

SEQ ID NO: 33621 - protein, 9 aa, Artificial Sequence
  Peptide Derived from Human Papillomavirus
ADPYGDSMF

SEQ ID NO: 33622 - protein, 10 aa, Artificial Sequence
  Peptide Derived from Human Papillomavirus
ADPYGDSMFF

SEQ ID NO: 33623 - protein, 8 aa, Artificial Sequence
  Peptide Derived from Human Papillomavirus
ADVMSYIH

SEQ ID NO: 33624 - protein, 11 aa, Artificial Sequence
  Peptide Derived from Human Papillomavirus
AGGGNKQDIPK

SEQ ID NO: 33625 - protein, 8 aa, Artificial Sequence
  Peptide Derived from Human Papillomavirus
AIGEHWAK

SEQ ID NO: 33626 - protein, 11 aa, Artificial Sequence
  Peptide Derived from Human Papillomavirus
AIGEHWAKGTA

SEQ ID NO: 33627 - protein, 8 aa, Artificial Sequence
  Peptide Derived from Human Papillomavirus
AITCQKDA

SEQ ID NO: 33628 - protein, 9 aa, Artificial Sequence
  Peptide Derived from Human Papillomavirus
AITCQKDAA

SEQ ID NO: 33629 - protein, 11 aa, Artificial Sequence
  Peptide Derived from Human Papillomavirus
AITCQKDAAPA

SEQ ID NO: 33630 - protein, 11 aa, Artificial Sequence
  Peptide Derived from Human Papillomavirus
ALWRPSDNTVY

SEQ ID NO: 33631 - protein, 11 aa, Artificial Sequence
  Peptide Derived from Human Papillomavirus
AMDFSTLQDTK

SEQ ID NO: 33632 - protein, 8 aa, Artificial Sequence
  Peptide Derived from Human Papillomavirus
ASPGSCVY

SEQ ID NO: 33633 - protein, 11 aa, Artificial Sequence
  Peptide Derived from Human Papillomavirus
ASTQSPVPGQY

SEQ ID NO: 33634 - protein, 9 aa, Artificial Sequence
  Peptide Derived from Human Papillomavirus
ATKFKQYSR

SEQ ID NO: 33635 - protein, 10 aa, Artificial Sequence
  Peptide Derived from Human Papillomavirus
ATKFKQYSRH

SEQ ID NO: 33636 - protein, 10 aa, Artificial Sequence
  Peptide Derived from Human Papillomavirus
ATSNVSEDVR

SEQ ID NO: 33637 - protein, 8 aa, Artificial Sequence
  Peptide Derived from Human Papillomavirus
ATTSSKPA

SEQ ID NO: 33638 - protein, 9 aa, Artificial Sequence
  Peptide Derived from Human Papillomavirus
ATTSSKPAK

SEQ ID NO: 33639 - protein, 10 aa, Artificial Sequence
  Peptide Derived from Human Papillomavirus
ATTSSKPAKR

SEQ ID NO: 33640 - protein, 8 aa, Artificial Sequence
  Peptide Derived from Human Papillomavirus
CAGVEIGR

SEQ ID NO: 33641 - protein, 8 aa, Artificial Sequence
  Peptide Derived from Human Papillomavirus
CAPAIGEH

SEQ ID NO: 33642 - protein, 10 aa, Artificial Sequence
  Peptide Derived from Human Papillomavirus
CAPAIGEHWA

SEQ ID NO: 33643 - protein, 11 aa, Artificial Sequence
  Peptide Derived from Human Papillomavirus
CAPAIGEHWAK

SEQ ID NO: 33644 - protein, 8 aa, Artificial Sequence
  Peptide Derived from Human Papillomavirus
CGHYIILF

SEQ ID NO: 33645 - protein, 10 aa, Artificial Sequence
  Peptide Derived from Human Papillomavirus
CGHYIILFLR

SEQ ID NO: 33646 - protein, 8 aa, Artificial Sequence
  Peptide Derived from Human Papillomavirus
CILGCAPA

SEQ ID NO: 33647 - protein, 8 aa, Artificial Sequence
  Peptide Derived from Human Papillomavirus
CLRREQLF

SEQ ID NO: 33648 - protein, 9 aa, Artificial Sequence
  Peptide Derived from Human Papillomavirus
CLRREQLFA

SEQ ID NO: 33649 - protein, 10 aa, Artificial Sequence
  Peptide Derived from Human Papillomavirus
CLRREQLFAR

SEQ ID NO: 33650 - protein, 11 aa, Artificial Sequence
  Peptide Derived from Human Papillomavirus
CLRREQLFARH

SEQ ID NO: 33651 - protein, 10 aa, Artificial Sequence
  Peptide Derived from Human Papillomavirus
CLYTRVLILH

SEQ ID NO: 33652 - protein, 11 aa, Artificial Sequence
  Peptide Derived from Human Papillomavirus
CLYTRVLILHY

SEQ ID NO: 33653 - protein, 8 aa, Artificial Sequence
  Peptide Derived from Human Papillomavirus
DAAPAENK

SEQ ID NO: 33654 - protein, 11 aa, Artificial Sequence
  Peptide Derived from Human Papillomavirus
DAAPAENKDPY

SEQ ID NO: 33655 - protein, 8 aa, Artificial Sequence
  Peptide Derived from Human Papillomavirus
DATKFKQY

SEQ ID NO: 33656 - protein, 10 aa, Artificial Sequence
  Peptide Derived from Human Papillomavirus
DATKFKQYSR

SEQ ID NO: 33657 - protein, 11 aa, Artificial Sequence
  Peptide Derived from Human Papillomavirus
DATKFKQYSRH

SEQ ID NO: 33658 - protein, 8 aa, Artificial Sequence
  Peptide Derived from Human Papillomavirus
DCPPLELK

SEQ ID NO: 33659 - protein, 8 aa, Artificial Sequence
  Peptide Derived from Human Papillomavirus
DDTESSHA

SEQ ID NO: 33660 - protein, 9 aa, Artificial Sequence
  Peptide Derived from Human Papillomavirus
DDTESSHAA

SEQ ID NO: 33661 - protein, 10 aa, Artificial Sequence
  Peptide Derived from Human Papillomavirus
DDYVTPTSIF

SEQ ID NO: 33662 - protein, 11 aa, Artificial Sequence
  Peptide Derived from Human Papillomavirus
DDYVTPTSIFY

SEQ ID NO: 33663 - protein, 9 aa, Artificial Sequence
  Peptide Derived from Human Papillomavirus
DFSTLQDTK

SEQ ID NO: 33664 - protein, 9 aa, Artificial Sequence
  Peptide Derived from Human Papillomavirus
DGDMVDTGY

SEQ ID NO: 33665 - protein, 11 aa, Artificial Sequence
  Peptide Derived from Human Papillomavirus
DGDMVDTGYGA

SEQ ID NO: 33666 - protein, 8 aa, Artificial Sequence
  Peptide Derived from Human Papillomavirus
DICQSICK

SEQ ID NO: 33667 - protein, 9 aa, Artificial Sequence
  Peptide Derived from Human Papillomavirus
DICQSICKY

SEQ ID NO: 33668 - protein, 8 aa, Artificial Sequence
  Peptide Derived from Human Papillomavirus
DIPKVSAY

SEQ ID NO: 33669 - protein, 10 aa, Artificial Sequence
  Peptide Derived from Human Papillomavirus
DIPKVSAYQY

SEQ ID NO: 33670 - protein, 11 aa, Artificial Sequence
  Peptide Derived from Human Papillomavirus
DIPKVSAYQYR

SEQ ID NO: 33671 - protein, 9 aa, Artificial Sequence
  Peptide Derived from Human Papillomavirus
DLDQYPLGR

SEQ ID NO: 33672 - protein, 10 aa, Artificial Sequence
  Peptide Derived from Human Papillomavirus
DLDQYPLGRK

SEQ ID NO: 33673 - protein, 11 aa, Artificial Sequence
  Peptide Derived from Human Papillomavirus
DLDQYPLGRKF

SEQ ID NO: 33674 - protein, 9 aa, Artificial Sequence
  Peptide Derived from Human Papillomavirus
DMVDTGYGA

SEQ ID NO: 33675 - protein, 8 aa, Artificial Sequence
  Peptide Derived from Human Papillomavirus
DSMFFCLR

SEQ ID NO: 33676 - protein, 9 aa, Artificial Sequence
  Peptide Derived from Human Papillomavirus
DSMFFCLRR

SEQ ID NO: 33677 - protein, 9 aa, Artificial Sequence
  Peptide Derived from Human Papillomavirus
DSQLFNKPY

SEQ ID NO: 33678 - protein, 8 aa, Artificial Sequence
  Peptide Derived from Human Papillomavirus
DTESSHAA

SEQ ID NO: 33679 - protein, 9 aa, Artificial Sequence
  Peptide Derived from Human Papillomavirus
DTGYGAMDF

SEQ ID NO: 33680 - protein, 11 aa, Artificial Sequence
  Peptide Derived from Human Papillomavirus
DTSIYNPETQR

SEQ ID NO: 33681 - protein, 8 aa, Artificial Sequence
  Peptide Derived from Human Papillomavirus
DTVPQSLY

SEQ ID NO: 33682 - protein, 10 aa, Artificial Sequence
  Peptide Derived from Human Papillomavirus
DTVPQSLYIK

SEQ ID NO: 33683 - protein, 10 aa, Artificial Sequence
  Peptide Derived from Human Papillomavirus
DTYRFVQSVA

SEQ ID NO: 33684 - protein, 10 aa, Artificial Sequence
  Peptide Derived from Human Papillomavirus
DVRDNVSVDY

SEQ ID NO: 33685 - protein, 11 aa, Artificial Sequence
  Peptide Derived from Human Papillomavirus
DVRDNVSVDYK

SEQ ID NO: 33686 - protein, 10 aa, Artificial Sequence
  Peptide Derived from Human Papillomavirus
EDGDMVDTGY

SEQ ID NO: 33687 - protein, 11 aa, Artificial Sequence
  Peptide Derived from Human Papillomavirus
EDVRDNVSVDY

SEQ ID NO: 33688 - protein, 8 aa, Artificial Sequence
  Peptide Derived from Human Papillomavirus
ETQRLVWA

SEQ ID NO: 33689 - protein, 10 aa, Artificial Sequence
  Peptide Derived from Human Papillomavirus
ETQRLVWACA

SEQ ID NO: 33690 - protein, 8 aa, Artificial Sequence
  Peptide Derived from Human Papillomavirus
FARHFWNR

SEQ ID NO: 33691 - protein, 9 aa, Artificial Sequence
  Peptide Derived from Human Papillomavirus
FARHFWNRA

SEQ ID NO: 33692 - protein, 9 aa, Artificial Sequence
  Peptide Derived from Human Papillomavirus
FCLRREQLF

SEQ ID NO: 33693 - protein, 10 aa, Artificial Sequence
  Peptide Derived from Human Papillomavirus
FCLRREQLFA

SEQ ID NO: 33694 - protein, 11 aa, Artificial Sequence
  Peptide Derived from Human Papillomavirus
FCLRREQLFAR

SEQ ID NO: 33695 - protein, 10 aa, Artificial Sequence
  Peptide Derived from Human Papillomavirus
FFCLRREQLF

SEQ ID NO: 33696 - protein, 11 aa, Artificial Sequence
  Peptide Derived from Human Papillomavirus
FFCLRREQLFA

SEQ ID NO: 33697 - protein, 9 aa, Artificial Sequence
  Peptide Derived from Human Papillomavirus
FGLPDTSIY

SEQ ID NO: 33698 - protein, 8 aa, Artificial Sequence
  Peptide Derived from Human Papillomavirus
FLQMALWR

SEQ ID NO: 33699 - protein, 8 aa, Artificial Sequence
  Peptide Derived from Human Papillomavirus
FLRNVNVF

SEQ ID NO: 33700 - protein, 11 aa, Artificial Sequence
  Peptide Derived from Human Papillomavirus
FLRNVNVFPIF

SEQ ID NO: 33701 - protein, 8 aa, Artificial Sequence
  Peptide Derived from Human Papillomavirus
FLVQAGLR

SEQ ID NO: 33702 - protein, 9 aa, Artificial Sequence
  Peptide Derived from Human Papillomavirus
FLVQAGLRR

SEQ ID NO: 33703 - protein, 10 aa, Artificial Sequence
  Peptide Derived from Human Papillomavirus
FLVQAGLRRK

SEQ ID NO: 33704 - protein, 8 aa, Artificial Sequence
  Peptide Derived from Human Papillomavirus
FSLDLDQY

SEQ ID NO: 33705 - protein, 8 aa, Artificial Sequence
  Peptide Derived from Human Papillomavirus
FSTLQDTK

SEQ ID NO: 33706 - protein, 11 aa, Artificial Sequence
  Peptide Derived from Human Papillomavirus
FVQSVAITCQK

SEQ ID NO: 33707 - protein, 9 aa, Artificial Sequence
  Peptide Derived from Human Papillomavirus
GCAPAIGEH

SEQ ID NO: 33708 - protein, 11 aa, Artificial Sequence
  Peptide Derived from Human Papillomavirus
GCAPAIGEHWA

SEQ ID NO: 33709 - protein, 9 aa, Artificial Sequence
  Peptide Derived from Human Papillomavirus
GDCPPLELK

SEQ ID NO: 33710 - protein, 8 aa, Artificial Sequence
  Peptide Derived from Human Papillomavirus
GDMVDTGY

SEQ ID NO: 33711 - protein, 10 aa, Artificial Sequence
  Peptide Derived from Human Papillomavirus
GDMVDTGYGA

SEQ ID NO: 33712 - protein, 9 aa, Artificial Sequence
  Peptide Derived from Human Papillomavirus
GDSMFFCLR

SEQ ID NO: 33713 - protein, 10 aa, Artificial Sequence
  Peptide Derived from Human Papillomavirus
GDSMFFCLRR

SEQ ID NO: 33714 - protein, 9 aa, Artificial Sequence
  Peptide Derived from Human Papillomavirus
GDTVPQSLY

SEQ ID NO: 33715 - protein, 11 aa, Artificial Sequence
  Peptide Derived from Human Papillomavirus
GDTVPQSLYIK

SEQ ID NO: 33716 - protein, 10 aa, Artificial Sequence
  Peptide Derived from Human Papillomavirus
GGGNKQDIPK

SEQ ID NO: 33717 - protein, 9 aa, Artificial Sequence
  Peptide Derived from Human Papillomavirus
GGNKQDIPK

SEQ ID NO: 33718 - protein, 8 aa, Artificial Sequence
  Peptide Derived from Human Papillomavirus
GLPDTSIY

SEQ ID NO: 33719 - protein, 11 aa, Artificial Sequence
  Peptide Derived from Human Papillomavirus
GLRRKPTIGPR

SEQ ID NO: 33720 - protein, 8 aa, Artificial Sequence
  Peptide Derived from Human Papillomavirus
GLSGHPFY

SEQ ID NO: 33721 - protein, 10 aa, Artificial Sequence
  Peptide Derived from Human Papillomavirus
GLSGHPFYNK

SEQ ID NO: 33722 - protein, 11 aa, Artificial Sequence
  Peptide Derived from Human Papillomavirus
GMPASPGSCVY

SEQ ID NO: 33723 - protein, 11 aa, Artificial Sequence
  Peptide Derived from Human Papillomavirus
GSIVTSDSQLF

SEQ ID NO: 33724 - protein, 9 aa, Artificial Sequence
  Peptide Derived from Human Papillomavirus
GVCWHNQLF

SEQ ID NO: 33725 - protein, 9 aa, Artificial Sequence
  Peptide Derived from Human Papillomavirus
GVGLSGHPF

SEQ ID NO: 33726 - protein, 10 aa, Artificial Sequence
  Peptide Derived from Human Papillomavirus
GVGLSGHPFY

SEQ ID NO: 33727 - protein, 8 aa, Artificial Sequence
  Peptide Derived from Human Papillomavirus
HIIICGHY

SEQ ID NO: 33728 - protein, 10 aa, Artificial Sequence
  Peptide Derived from Human Papillomavirus
HLLPLYGPLY

SEQ ID NO: 33729 - protein, 11 aa, Artificial Sequence
  Peptide Derived from Human Papillomavirus
HLLPLYGPLYH

SEQ ID NO: 33730 - protein, 9 aa, Artificial Sequence
  Peptide Derived from Human Papillomavirus
HSILVYMVH

SEQ ID NO: 33731 - protein, 9 aa, Artificial Sequence
  Peptide Derived from Human Papillomavirus
HVEEYDLQF

SEQ ID NO: 33732 - protein, 11 aa, Artificial Sequence
  Peptide Derived from Human Papillomavirus
HVEEYDLQFIF

SEQ ID NO: 33733 - protein, 9 aa, Artificial Sequence
  Peptide Derived from Human Papillomavirus
ICGHYIILF

SEQ ID NO: 33734 - protein, 11 aa, Artificial Sequence
  Peptide Derived from Human Papillomavirus
ICGHYIILFLR

SEQ ID NO: 33735 - protein, 8 aa, Artificial Sequence
  Peptide Derived from Human Papillomavirus
ICQSICKY

SEQ ID NO: 33736 - protein, 11 aa, Artificial Sequence
  Peptide Derived from Human Papillomavirus
ICQSICKYPDY

SEQ ID NO: 33737 - protein, 9 aa, Artificial Sequence
  Peptide Derived from Human Papillomavirus
IFLQMALWR

SEQ ID NO: 33738 - protein, 11 aa, Artificial Sequence
  Peptide Derived from Human Papillomavirus
IFQLCTITLTA

SEQ ID NO: 33739 - protein, 9 aa, Artificial Sequence
  Peptide Derived from Human Papillomavirus
IFYHAGSSR

SEQ ID NO: 33740 - protein, 10 aa, Artificial Sequence
  Peptide Derived from Human Papillomavirus
IGEHWAKGTA

SEQ ID NO: 33741 - protein, 8 aa, Artificial Sequence
  Peptide Derived from Human Papillomavirus
IGPRKRSA

SEQ ID NO: 33742 - protein, 11 aa, Artificial Sequence
  Peptide Derived from Human Papillomavirus
IGPRKRSAPSA

SEQ ID NO: 33743 - protein, 10 aa, Artificial Sequence
  Peptide Derived from Human Papillomavirus
IICGHYIILF

SEQ ID NO: 33744 - protein, 11 aa, Artificial Sequence
  Peptide Derived from Human Papillomavirus
IIICGHYIILF

SEQ ID NO: 33745 - protein, 11 aa, Artificial Sequence
  Peptide Derived from Human Papillomavirus
IILFLRNVNVF

SEQ ID NO: 33746 - protein, 10 aa, Artificial Sequence
  Peptide Derived from Human Papillomavirus
ILFLRNVNVF

SEQ ID NO: 33747 - protein, 11 aa, Artificial Sequence
  Peptide Derived from Human Papillomavirus
ILGCAPAIGEH

SEQ ID NO: 33748 - protein, 10 aa, Artificial Sequence
  Peptide Derived from Human Papillomavirus
ILHYHLLPLY

SEQ ID NO: 33749 - protein, 8 aa, Artificial Sequence
  Peptide Derived from Human Papillomavirus
ITCQKDAA

SEQ ID NO: 33750 - protein, 10 aa, Artificial Sequence
  Peptide Derived from Human Papillomavirus
ITCQKDAAPA

SEQ ID NO: 33751 - protein, 10 aa, Artificial Sequence
  Peptide Derived from Human Papillomavirus
ITLTADVMSY

SEQ ID NO: 33752 - protein, 9 aa, Artificial Sequence
  Peptide Derived from Human Papillomavirus
IVTSDSQLF

SEQ ID NO: 33753 - protein, 11 aa, Artificial Sequence
  Peptide Derived from Human Papillomavirus
IVTSDSQLFNK

SEQ ID NO: 33754 - protein, 9 aa, Artificial Sequence
  Peptide Derived from Human Papillomavirus
KDAAPAENK

SEQ ID NO: 33755 - protein, 8 aa, Artificial Sequence
  Peptide Derived from Human Papillomavirus
KDPYDKLK

SEQ ID NO: 33756 - protein, 9 aa, Artificial Sequence
  Peptide Derived from Human Papillomavirus
KDPYDKLKF

SEQ ID NO: 33757 - protein, 10 aa, Artificial Sequence
  Peptide Derived from Human Papillomavirus
KFGLPDTSIY

SEQ ID NO: 33758 - protein, 8 aa, Artificial Sequence
  Peptide Derived from Human Papillomavirus
KFKQYSRH

SEQ ID NO: 33759 - protein, 9 aa, Artificial Sequence
  Peptide Derived from Human Papillomavirus
KFLVQAGLR

SEQ ID NO: 33760 - protein, 10 aa, Artificial Sequence
  Peptide Derived from Human Papillomavirus
KFLVQAGLRR

SEQ ID NO: 33761 - protein, 11 aa, Artificial Sequence
  Peptide Derived from Human Papillomavirus
KFLVQAGLRRK

SEQ ID NO: 33762 - protein, 9 aa, Artificial Sequence
  Peptide Derived from Human Papillomavirus
KFSLDLDQY

SEQ ID NO: 33763 - protein, 8 aa, Artificial Sequence
  Peptide Derived from Human Papillomavirus
KFWNVDLK

SEQ ID NO: 33764 - protein, 10 aa, Artificial Sequence
  Peptide Derived from Human Papillomavirus
KFWNVDLKEK

SEQ ID NO: 33765 - protein, 11 aa, Artificial Sequence
  Peptide Derived from Human Papillomavirus
KFWNVDLKEKF

SEQ ID NO: 33766 - protein, 8 aa, Artificial Sequence
  Peptide Derived from Human Papillomavirus
KGTACKSR

SEQ ID NO: 33767 - protein, 9 aa, Artificial Sequence
  Peptide Derived from Human Papillomavirus
KLDDTESSH

SEQ ID NO: 33768 - protein, 10 aa, Artificial Sequence
  Peptide Derived from Human Papillomavirus
KLDDTESSHA

SEQ ID NO: 33769 - protein, 11 aa, Artificial Sequence
  Peptide Derived from Human Papillomavirus
KLDDTESSHAA

SEQ ID NO: 33770 - protein, 10 aa, Artificial Sequence
  Peptide Derived from Human Papillomavirus
KLKFWNVDLK

SEQ ID NO: 33771 - protein, 8 aa, Artificial Sequence
  Peptide Derived from Human Papillomavirus
KVSAYQYR

SEQ ID NO: 33772 - protein, 10 aa, Artificial Sequence
  Peptide Derived from Human Papillomavirus
KVSAYQYRVF

SEQ ID NO: 33773 - protein, 11 aa, Artificial Sequence
  Peptide Derived from Human Papillomavirus
KVSAYQYRVFR

SEQ ID NO: 33774 - protein, 9 aa, Artificial Sequence
  Peptide Derived from Human Papillomavirus
LCILGCAPA

SEQ ID NO: 33775 - protein, 8 aa, Artificial Sequence
  Peptide Derived from Human Papillomavirus
LCTITLTA

SEQ ID NO: 33776 - protein, 8 aa, Artificial Sequence
  Peptide Derived from Human Papillomavirus
LDDTESSH

SEQ ID NO: 33777 - protein, 9 aa, Artificial Sequence
  Peptide Derived from Human Papillomavirus
LDDTESSHA

SEQ ID NO: 33778 - protein, 10 aa, Artificial Sequence
  Peptide Derived from Human Papillomavirus
LDDTESSHAA

SEQ ID NO: 33779 - protein, 9 aa, Artificial Sequence
  Peptide Derived from Human Papillomavirus
LDICQSICK

SEQ ID NO: 33780 - protein, 10 aa, Artificial Sequence
  Peptide Derived from Human Papillomavirus
LDICQSICKY

SEQ ID NO: 33781 - protein, 10 aa, Artificial Sequence
  Peptide Derived from Human Papillomavirus
LDLDQYPLGR

SEQ ID NO: 33782 - protein, 11 aa, Artificial Sequence
  Peptide Derived from Human Papillomavirus
LDLDQYPLGRK

SEQ ID NO: 33783 - protein, 8 aa, Artificial Sequence
  Peptide Derived from Human Papillomavirus
LDQYPLGR

SEQ ID NO: 33784 - protein, 9 aa, Artificial Sequence
  Peptide Derived from Human Papillomavirus
LDQYPLGRK

SEQ ID NO: 33785 - protein, 10 aa, Artificial Sequence
  Peptide Derived from Human Papillomavirus
LDQYPLGRKF

SEQ ID NO: 33786 - protein, 9 aa, Artificial Sequence
  Peptide Derived from Human Papillomavirus
LFARHFWNR

SEQ ID NO: 33787 - protein, 10 aa, Artificial Sequence
  Peptide Derived from Human Papillomavirus
LFARHFWNRA

SEQ ID NO: 33788 - protein, 9 aa, Artificial Sequence
  Peptide Derived from Human Papillomavirus
LFLRNVNVF

SEQ ID NO: 33789 - protein, 9 aa, Artificial Sequence
  Peptide Derived from Human Papillomavirus
LFNKPYWLH

SEQ ID NO: 33790 - protein, 10 aa, Artificial Sequence
  Peptide Derived from Human Papillomavirus
LFNKPYWLHK

SEQ ID NO: 33791 - protein, 11 aa, Artificial Sequence
  Peptide Derived from Human Papillomavirus
LFNKPYWLHKA

SEQ ID NO: 33792 - protein, 10 aa, Artificial Sequence
  Peptide Derived from Human Papillomavirus
LGCAPAIGEH

SEQ ID NO: 33793 - protein, 9 aa, Artificial Sequence
  Peptide Derived from Human Papillomavirus
LGRKFLVQA

SEQ ID NO: 33794 - protein, 8 aa, Artificial Sequence
  Peptide Derived from Human Papillomavirus
LGVGLSGH

SEQ ID NO: 33795 - protein, 10 aa, Artificial Sequence
  Peptide Derived from Human Papillomavirus
LGVGLSGHPF

SEQ ID NO: 33796 - protein, 11 aa, Artificial Sequence
  Peptide Derived from Human Papillomavirus
LGVGLSGHPFY

SEQ ID NO: 33797 - protein, 11 aa, Artificial Sequence
  Peptide Derived from Human Papillomavirus
LILHYHLLPLY

SEQ ID NO: 33798 - protein, 9 aa, Artificial Sequence
  Peptide Derived from Human Papillomavirus
LLPLYGPLY

SEQ ID NO: 33799 - protein, 10 aa, Artificial Sequence
  Peptide Derived from Human Papillomavirus
LLPLYGPLYH

SEQ ID NO: 33800 - protein, 8 aa, Artificial Sequence
  Peptide Derived from Human Papillomavirus
LLTVGNPY

SEQ ID NO: 33801 - protein, 9 aa, Artificial Sequence
  Peptide Derived from Human Papillomavirus
LLTVGNPYF

SEQ ID NO: 33802 - protein, 10 aa, Artificial Sequence
  Peptide Derived from Human Papillomavirus
LLTVGNPYFR

SEQ ID NO: 33803 - protein, 9 aa, Artificial Sequence
  Peptide Derived from Human Papillomavirus
LSGHPFYNK

SEQ ID NO: 33804 - protein, 8 aa, Artificial Sequence
  Peptide Derived from Human Papillomavirus
LTADVMSY

SEQ ID NO: 33805 - protein, 10 aa, Artificial Sequence
  Peptide Derived from Human Papillomavirus
LTADVMSYIH

SEQ ID NO: 33806 - protein, 8 aa, Artificial Sequence
  Peptide Derived from Human Papillomavirus
LTVGNPYF

SEQ ID NO: 33807 - protein, 9 aa, Artificial Sequence
  Peptide Derived from Human Papillomavirus
LTVGNPYFR

SEQ ID NO: 33808 - protein, 8 aa, Artificial Sequence
  Peptide Derived from Human Papillomavirus
LVQAGLRR

SEQ ID NO: 33809 - protein, 9 aa, Artificial Sequence
  Peptide Derived from Human Papillomavirus
LVQAGLRRK

SEQ ID NO: 33810 - protein, 11 aa, Artificial Sequence
  Peptide Derived from Human Papillomavirus
MCLYTRVLILH

SEQ ID NO: 33811 - protein, 10 aa, Artificial Sequence
  Peptide Derived from Human Papillomavirus
MDFSTLQDTK

SEQ ID NO: 33812 - protein, 11 aa, Artificial Sequence
  Peptide Derived from Human Papillomavirus
MFFCLRREQLF

SEQ ID NO: 33813 - protein, 10 aa, Artificial Sequence
  Peptide Derived from Human Papillomavirus
MGDTVPQSLY

SEQ ID NO: 33814 - protein, 11 aa, Artificial Sequence
  Peptide Derived from Human Papillomavirus
MSADPYGDSMF

SEQ ID NO: 33815 - protein, 8 aa, Artificial Sequence
  Peptide Derived from Human Papillomavirus
MVDTGYGA

SEQ ID NO: 33816 - protein, 11 aa, Artificial Sequence
  Peptide Derived from Human Papillomavirus
MVDTGYGAMDF

SEQ ID NO: 33817 - protein, 9 aa, Artificial Sequence
  Peptide Derived from Human Papillomavirus
MVHIIICGH

SEQ ID NO: 33818 - protein, 10 aa, Artificial Sequence
  Peptide Derived from Human Papillomavirus
MVHIIICGHY

SEQ ID NO: 33819 - protein, 10 aa, Artificial Sequence
  Peptide Derived from Human Papillomavirus
NGVCWHNQLF

SEQ ID NO: 33820 - protein, 10 aa, Artificial Sequence
  Peptide Derived from Human Papillomavirus
NSSILEDWNF

SEQ ID NO: 33821 - protein, 11 aa, Artificial Sequence
  Peptide Derived from Human Papillomavirus
NTVYLPPPSVA

SEQ ID NO: 33822 - protein, 8 aa, Artificial Sequence
  Peptide Derived from Human Papillomavirus
NVDLKEKF

SEQ ID NO: 33823 - protein, 10 aa, Artificial Sequence
  Peptide Derived from Human Papillomavirus
NVFPIFLQMA

SEQ ID NO: 33824 - protein, 8 aa, Artificial Sequence
  Peptide Derived from Human Papillomavirus
NVNVFPIF

SEQ ID NO: 33825 - protein, 8 aa, Artificial Sequence
  Peptide Derived from Human Papillomavirus
PAENKDPY

SEQ ID NO: 33826 - protein, 10 aa, Artificial Sequence
  Peptide Derived from Human Papillomavirus
PAENKDPYDK

SEQ ID NO: 33827 - protein, 8 aa, Artificial Sequence
  Peptide Derived from Human Papillomavirus
PAIGEHWA

SEQ ID NO: 33828 - protein, 9 aa, Artificial Sequence
  Peptide Derived from Human Papillomavirus
PAIGEHWAK

SEQ ID NO: 33829 - protein, 8 aa, Artificial Sequence
  Peptide Derived from Human Papillomavirus
PAKRVRVR

SEQ ID NO: 33830 - protein, 9 aa, Artificial Sequence
  Peptide Derived from Human Papillomavirus
PAKRVRVRA

SEQ ID NO: 33831 - protein, 10 aa, Artificial Sequence
  Peptide Derived from Human Papillomavirus
PAKRVRVRAR

SEQ ID NO: 33832 - protein, 11 aa, Artificial Sequence
  Peptide Derived from Human Papillomavirus
PAKRVRVRARK

SEQ ID NO: 33833 - protein, 9 aa, Artificial Sequence
  Peptide Derived from Human Papillomavirus
PASPGSCVY

SEQ ID NO: 33834 - protein, 8 aa, Artificial Sequence
  Peptide Derived from Human Papillomavirus
PDYLQMSA

SEQ ID NO: 33835 - protein, 11 aa, Artificial Sequence
  Peptide Derived from Human Papillomavirus
PDYLQMSADPY

SEQ ID NO: 33836 - protein, 8 aa, Artificial Sequence
  Peptide Derived from Human Papillomavirus
PGQYDATK

SEQ ID NO: 33837 - protein, 9 aa, Artificial Sequence
  Peptide Derived from Human Papillomavirus
PGQYDATKF

SEQ ID NO: 33838 - protein, 10 aa, Artificial Sequence
  Peptide Derived from Human Papillomavirus
PGQYDATKFK

SEQ ID NO: 33839 - protein, 10 aa, Artificial Sequence
  Peptide Derived from Human Papillomavirus
PIFLQMALWR

SEQ ID NO: 33840 - protein, 10 aa, Artificial Sequence
  Peptide Derived from Human Papillomavirus
PLDICQSICK

SEQ ID NO: 33841 - protein, 11 aa, Artificial Sequence
  Peptide Derived from Human Papillomavirus
PLDICQSICKY

SEQ ID NO: 33842 - protein, 10 aa, Artificial Sequence
  Peptide Derived from Human Papillomavirus
PLGRKFLVQA

SEQ ID NO: 33843 - protein, 9 aa, Artificial Sequence
  Peptide Derived from Human Papillomavirus
PLGVGLSGH

SEQ ID NO: 33844 - protein, 11 aa, Artificial Sequence
  Peptide Derived from Human Papillomavirus
PLGVGLSGHPF

SEQ ID NO: 33845 - protein, 8 aa, Artificial Sequence
  Peptide Derived from Human Papillomavirus
PLHSILVY

SEQ ID NO: 33846 - protein, 11 aa, Artificial Sequence
  Peptide Derived from Human Papillomavirus
PLHSILVYMVH

SEQ ID NO: 33847 - protein, 10 aa, Artificial Sequence
  Peptide Derived from Human Papillomavirus
PLPLHSILVY

SEQ ID NO: 33848 - protein, 8 aa, Artificial Sequence
  Peptide Derived from Human Papillomavirus
PLYGPLYH

SEQ ID NO: 33849 - protein, 10 aa, Artificial Sequence
  Peptide Derived from Human Papillomavirus
PLYGPLYHPR

SEQ ID NO: 33850 - protein, 11 aa, Artificial Sequence
  Peptide Derived from Human Papillomavirus
PLYHPRPLPLH

SEQ ID NO: 33851 - protein, 8 aa, Artificial Sequence
  Peptide Derived from Human Papillomavirus
PSATTSSK

SEQ ID NO: 33852 - protein, 10 aa, Artificial Sequence
  Peptide Derived from Human Papillomavirus
PSATTSSKPA

SEQ ID NO: 33853 - protein, 11 aa, Artificial Sequence
  Peptide Derived from Human Papillomavirus
PSATTSSKPAK

SEQ ID NO: 33854 - protein, 9 aa, Artificial Sequence
  Peptide Derived from Human Papillomavirus
PSTNLTICA

SEQ ID NO: 33855 - protein, 8 aa, Artificial Sequence
  Peptide Derived from Human Papillomavirus
PTIGPRKR

SEQ ID NO: 33856 - protein, 10 aa, Artificial Sequence
  Peptide Derived from Human Papillomavirus
PTIGPRKRSA

SEQ ID NO: 33857 - protein, 8 aa, Artificial Sequence
  Peptide Derived from Human Papillomavirus
PTSIFYHA

SEQ ID NO: 33858 - protein, 9 aa, Artificial Sequence
  Peptide Derived from Human Papillomavirus
PTTSLVDTY

SEQ ID NO: 33859 - protein, 10 aa, Artificial Sequence
  Peptide Derived from Human Papillomavirus
PTTSLVDTYR

SEQ ID NO: 33860 - protein, 11 aa, Artificial Sequence
  Peptide Derived from Human Papillomavirus
PTTSLVDTYRF

SEQ ID NO: 33861 - protein, 8 aa, Artificial Sequence
  Peptide Derived from Human Papillomavirus
PVPGQYDA

SEQ ID NO: 33862 - protein, 10 aa, Artificial Sequence
  Peptide Derived from Human Papillomavirus
PVPGQYDATK

SEQ ID NO: 33863 - protein, 11 aa, Artificial Sequence
  Peptide Derived from Human Papillomavirus
PVPGQYDATKF

SEQ ID NO: 33864 - protein, 8 aa, Artificial Sequence
  Peptide Derived from Human Papillomavirus
QDIPKVSA

SEQ ID NO: 33865 - protein, 9 aa, Artificial Sequence
  Peptide Derived from Human Papillomavirus
QDIPKVSAY

SEQ ID NO: 33866 - protein, 11 aa, Artificial Sequence
  Peptide Derived from Human Papillomavirus
QDIPKVSAYQY

SEQ ID NO: 33867 - protein, 10 aa, Artificial Sequence
  Peptide Derived from Human Papillomavirus
QGDCPPLELK

SEQ ID NO: 33868 - protein, 10 aa, Artificial Sequence
  Peptide Derived from Human Papillomavirus
QGHNNGVCWH

SEQ ID NO: 33869 - protein, 8 aa, Artificial Sequence
  Peptide Derived from Human Papillomavirus
QLCILGCA

SEQ ID NO: 33870 - protein, 10 aa, Artificial Sequence
  Peptide Derived from Human Papillomavirus
QLCILGCAPA

SEQ ID NO: 33871 - protein, 9 aa, Artificial Sequence
  Peptide Derived from Human Papillomavirus
QLCTITLTA

SEQ ID NO: 33872 - protein, 10 aa, Artificial Sequence
  Peptide Derived from Human Papillomavirus
QLFARHFWNR

SEQ ID NO: 33873 - protein, 11 aa, Artificial Sequence
  Peptide Derived from Human Papillomavirus
QLFARHFWNRA

SEQ ID NO: 33874 - protein, 10 aa, Artificial Sequence
  Peptide Derived from Human Papillomavirus
QLFNKPYWLH

SEQ ID NO: 33875 - protein, 11 aa, Artificial Sequence
  Peptide Derived from Human Papillomavirus
QLFNKPYWLHK

SEQ ID NO: 33876 - protein, 8 aa, Artificial Sequence
  Peptide Derived from Human Papillomavirus
QLPDPNKF

SEQ ID NO: 33877 - protein, 9 aa, Artificial Sequence
  Peptide Derived from Human Papillomavirus
QSICKYPDY

SEQ ID NO: 33878 - protein, 8 aa, Artificial Sequence
  Peptide Derived from Human Papillomavirus
QSPVPGQY

SEQ ID NO: 33879 - protein, 10 aa, Artificial Sequence
  Peptide Derived from Human Papillomavirus
QSPVPGQYDA

SEQ ID NO: 33880 - protein, 9 aa, Artificial Sequence
  Peptide Derived from Human Papillomavirus
QSVAITCQK

SEQ ID NO: 33881 - protein, 11 aa, Artificial Sequence
  Peptide Derived from Human Papillomavirus
QSVAITCQKDA

SEQ ID NO: 33882 - protein, 10 aa, Artificial Sequence
  Peptide Derived from Human Papillomavirus
QTQLCILGCA

SEQ ID NO: 33883 - protein, 8 aa, Artificial Sequence
  Peptide Derived from Human Papillomavirus
RDNVSVDY

SEQ ID NO: 33884 - protein, 9 aa, Artificial Sequence
  Peptide Derived from Human Papillomavirus
RDNVSVDYK

SEQ ID NO: 33885 - protein, 9 aa, Artificial Sequence
  Peptide Derived from Human Papillomavirus
RLLTVGNPY

SEQ ID NO: 33886 - protein, 10 aa, Artificial Sequence
  Peptide Derived from Human Papillomavirus
RLLTVGNPYF

SEQ ID NO: 33887 - protein, 11 aa, Artificial Sequence
  Peptide Derived from Human Papillomavirus
RLLTVGNPYFR

SEQ ID NO: 33888 - protein, 11 aa, Artificial Sequence
  Peptide Derived from Human Papillomavirus
RSAPSATTSSK

SEQ ID NO: 33889 - protein, 8 aa, Artificial Sequence
  Peptide Derived from Human Papillomavirus
RVLILHYH

SEQ ID NO: 33890 - protein, 9 aa, Artificial Sequence
  Peptide Derived from Human Papillomavirus
RVPAGGGNK

SEQ ID NO: 33891 - protein, 9 aa, Artificial Sequence
  Peptide Derived from Human Papillomavirus
RVQLPDPNK

SEQ ID NO: 33892 - protein, 10 aa, Artificial Sequence
  Peptide Derived from Human Papillomavirus
RVQLPDPNKF

SEQ ID NO: 33893 - protein, 8 aa, Artificial Sequence
  Peptide Derived from Human Papillomavirus
RVRVRARK

SEQ ID NO: 33894 - protein, 8 aa, Artificial Sequence
  Peptide Derived from Human Papillomavirus
RVVNTDDY

SEQ ID NO: 33895 - protein, 10 aa, Artificial Sequence
  Peptide Derived from Human Papillomavirus
SADPYGDSMF

SEQ ID NO: 33896 - protein, 11 aa, Artificial Sequence
  Peptide Derived from Human Papillomavirus
SADPYGDSMFF

SEQ ID NO: 33897 - protein, 10 aa, Artificial Sequence
  Peptide Derived from Human Papillomavirus
SAPSATTSSK

SEQ ID NO: 33898 - protein, 9 aa, Artificial Sequence
  Peptide Derived from Human Papillomavirus
SATTSSKPA

SEQ ID NO: 33899 - protein, 10 aa, Artificial Sequence
  Peptide Derived from Human Papillomavirus
SATTSSKPAK

SEQ ID NO: 33900 - protein, 11 aa, Artificial Sequence
  Peptide Derived from Human Papillomavirus
SATTSSKPAKR

SEQ ID NO: 33901 - protein, 8 aa, Artificial Sequence
  Peptide Derived from Human Papillomavirus
SAYQYRVF

SEQ ID NO: 33902 - protein, 9 aa, Artificial Sequence
  Peptide Derived from Human Papillomavirus
SAYQYRVFR

SEQ ID NO: 33903 - protein, 8 aa, Artificial Sequence
  Peptide Derived from Human Papillomavirus
SDSQLFNK

SEQ ID NO: 33904 - protein, 10 aa, Artificial Sequence
  Peptide Derived from Human Papillomavirus
SDSQLFNKPY

SEQ ID NO: 33905 - protein, 8 aa, Artificial Sequence
  Peptide Derived from Human Papillomavirus
SGHPFYNK

SEQ ID NO: 33906 - protein, 8 aa, Artificial Sequence
  Peptide Derived from Human Papillomavirus
SICKYPDY

SEQ ID NO: 33907 - protein, 10 aa, Artificial Sequence
  Peptide Derived from Human Papillomavirus
SIFYHAGSSR

SEQ ID NO: 33908 - protein, 8 aa, Artificial Sequence
  Peptide Derived from Human Papillomavirus
SILEDWNF

SEQ ID NO: 33909 - protein, 8 aa, Artificial Sequence
  Peptide Derived from Human Papillomavirus
SILVYMVH

SEQ ID NO: 33910 - protein, 10 aa, Artificial Sequence
  Peptide Derived from Human Papillomavirus
SIVTSDSQLF

SEQ ID NO: 33911 - protein, 9 aa, Artificial Sequence
  Peptide Derived from Human Papillomavirus
SIYNPETQR

SEQ ID NO: 33912 - protein, 11 aa, Artificial Sequence
  Peptide Derived from Human Papillomavirus
SLDLDQYPLGR

SEQ ID NO: 33913 - protein, 8 aa, Artificial Sequence
  Peptide Derived from Human Papillomavirus
SLVDTYRF

SEQ ID NO: 33914 - protein, 11 aa, Artificial Sequence
  Peptide Derived from Human Papillomavirus
SLYIKGTGMPA

SEQ ID NO: 33915 - protein, 8 aa, Artificial Sequence
  Peptide Derived from Human Papillomavirus
SMFFCLRR

SEQ ID NO: 33916 - protein, 9 aa, Artificial Sequence
  Peptide Derived from Human Papillomavirus
SSILEDWNF

SEQ ID NO: 33917 - protein, 9 aa, Artificial Sequence
  Peptide Derived from Human Papillomavirus
SSKPAKRVR

SEQ ID NO: 33918 - protein, 11 aa, Artificial Sequence
  Peptide Derived from Human Papillomavirus
SSKPAKRVRVR

SEQ ID NO: 33919 - protein, 11 aa, Artificial Sequence
  Peptide Derived from Human Papillomavirus
SSRLLTVGNPY

SEQ ID NO: 33920 - protein, 8 aa, Artificial Sequence
  Peptide Derived from Human Papillomavirus
STNLTICA

SEQ ID NO: 33921 - protein, 10 aa, Artificial Sequence
  Peptide Derived from Human Papillomavirus
STQSPVPGQY

SEQ ID NO: 33922 - protein, 8 aa, Artificial Sequence
  Peptide Derived from Human Papillomavirus
SVAITCQK

SEQ ID NO: 33923 - protein, 10 aa, Artificial Sequence
  Peptide Derived from Human Papillomavirus
SVAITCQKDA

SEQ ID NO: 33924 - protein, 11 aa, Artificial Sequence
  Peptide Derived from Human Papillomavirus
SVAITCQKDAA

SEQ ID NO: 33925 - protein, 11 aa, Artificial Sequence
  Peptide Derived from Human Papillomavirus
SVARVVNTDDY

SEQ ID NO: 33926 - protein, 9 aa, Artificial Sequence
  Peptide Derived from Human Papillomavirus
TADVMSYIH

SEQ ID NO: 33927 - protein, 9 aa, Artificial Sequence
  Peptide Derived from Human Papillomavirus
TCQKDAAPA

SEQ ID NO: 33928 - protein, 11 aa, Artificial Sequence
  Peptide Derived from Human Papillomavirus
TDDYVTPTSIF

SEQ ID NO: 33929 - protein, 8 aa, Artificial Sequence
  Peptide Derived from Human Papillomavirus
TGYGAMDF

SEQ ID NO: 33930 - protein, 9 aa, Artificial Sequence
  Peptide Derived from Human Papillomavirus
TIGPRKRSA

SEQ ID NO: 33931 - protein, 11 aa, Artificial Sequence
  Peptide Derived from Human Papillomavirus
TITLTADVMSY

SEQ ID NO: 33932 - protein, 9 aa, Artificial Sequence
  Peptide Derived from Human Papillomavirus
TLTADVMSY

SEQ ID NO: 33933 - protein, 11 aa, Artificial Sequence
  Peptide Derived from Human Papillomavirus
TLTADVMSYIH

SEQ ID NO: 33934 - protein, 11 aa, Artificial Sequence
  Peptide Derived from Human Papillomavirus
TMGDTVPQSLY

SEQ ID NO: 33935 - protein, 9 aa, Artificial Sequence
  Peptide Derived from Human Papillomavirus
TSDSQLFNK

SEQ ID NO: 33936 - protein, 11 aa, Artificial Sequence
  Peptide Derived from Human Papillomavirus
TSDSQLFNKPY

SEQ ID NO: 33937 - protein, 11 aa, Artificial Sequence
  Peptide Derived from Human Papillomavirus
TSIFYHAGSSR

SEQ ID NO: 33938 - protein, 10 aa, Artificial Sequence
  Peptide Derived from Human Papillomavirus
TSIYNPETQR

SEQ ID NO: 33939 - protein, 8 aa, Artificial Sequence
  Peptide Derived from Human Papillomavirus
TSLVDTYR

SEQ ID NO: 33940 - protein, 9 aa, Artificial Sequence
  Peptide Derived from Human Papillomavirus
TSLVDTYRF

SEQ ID NO: 33941 - protein, 9 aa, Artificial Sequence
  Peptide Derived from Human Papillomavirus
TSNVSEDVR

SEQ ID NO: 33942 - protein, 8 aa, Artificial Sequence
  Peptide Derived from Human Papillomavirus
TSSKPAKR

SEQ ID NO: 33943 - protein, 10 aa, Artificial Sequence
  Peptide Derived from Human Papillomavirus
TSSKPAKRVR

SEQ ID NO: 33944 - protein, 11 aa, Artificial Sequence
  Peptide Derived from Human Papillomavirus
TTPSTNLTICA

SEQ ID NO: 33945 - protein, 8 aa, Artificial Sequence
  Peptide Derived from Human Papillomavirus
TTSLVDTY

SEQ ID NO: 33946 - protein, 9 aa, Artificial Sequence
  Peptide Derived from Human Papillomavirus
TTSLVDTYR

SEQ ID NO: 33947 - protein, 10 aa, Artificial Sequence
  Peptide Derived from Human Papillomavirus
TTSLVDTYRF

SEQ ID NO: 33948 - protein, 8 aa, Artificial Sequence
  Peptide Derived from Human Papillomavirus
TTSSKPAK

SEQ ID NO: 33949 - protein, 9 aa, Artificial Sequence
  Peptide Derived from Human Papillomavirus
TTSSKPAKR

SEQ ID NO: 33950 - protein, 11 aa, Artificial Sequence
  Peptide Derived from Human Papillomavirus
TTSSKPAKRVR

SEQ ID NO: 33951 - protein, 8 aa, Artificial Sequence
  Peptide Derived from Human Papillomavirus
TVGNPYFR

SEQ ID NO: 33952 - protein, 11 aa, Artificial Sequence
  Peptide Derived from Human Papillomavirus
TVGNPYFRVPA

SEQ ID NO: 33953 - protein, 9 aa, Artificial Sequence
  Peptide Derived from Human Papillomavirus
TVPQSLYIK

SEQ ID NO: 33954 - protein, 10 aa, Artificial Sequence
  Peptide Derived from Human Papillomavirus
TVYLPPPSVA

SEQ ID NO: 33955 - protein, 11 aa, Artificial Sequence
  Peptide Derived from Human Papillomavirus
TVYLPPPSVAR

SEQ ID NO: 33956 - protein, 9 aa, Artificial Sequence
  Peptide Derived from Human Papillomavirus
VAITCQKDA

SEQ ID NO: 33957 - protein, 10 aa, Artificial Sequence
  Peptide Derived from Human Papillomavirus
VAITCQKDAA

SEQ ID NO: 33958 - protein, 10 aa, Artificial Sequence
  Peptide Derived from Human Papillomavirus
VARVVNTDDY

SEQ ID NO: 33959 - protein, 8 aa, Artificial Sequence
  Peptide Derived from Human Papillomavirus
VCWHNQLF

SEQ ID NO: 33960 - protein, 10 aa, Artificial Sequence
  Peptide Derived from Human Papillomavirus
VDTGYGAMDF

SEQ ID NO: 33961 - protein, 11 aa, Artificial Sequence
  Peptide Derived from Human Papillomavirus
VDTYRFVQSVA

SEQ ID NO: 33962 - protein, 9 aa, Artificial Sequence
  Peptide Derived from Human Papillomavirus
VFPIFLQMA

SEQ ID NO: 33963 - protein, 11 aa, Artificial Sequence
  Peptide Derived from Human Papillomavirus
VFRVQLPDPNK

SEQ ID NO: 33964 - protein, 8 aa, Artificial Sequence
  Peptide Derived from Human Papillomavirus
VGLSGHPF

SEQ ID NO: 33965 - protein, 9 aa, Artificial Sequence
  Peptide Derived from Human Papillomavirus
VGLSGHPFY

SEQ ID NO: 33966 - protein, 11 aa, Artificial Sequence
  Peptide Derived from Human Papillomavirus
VGLSGHPFYNK

SEQ ID NO: 33967 - protein, 10 aa, Artificial Sequence
  Peptide Derived from Human Papillomavirus
VGNPYFRVPA

SEQ ID NO: 33968 - protein, 9 aa, Artificial Sequence
  Peptide Derived from Human Papillomavirus
VSAYQYRVF

SEQ ID NO: 33969 - protein, 10 aa, Artificial Sequence
  Peptide Derived from Human Papillomavirus
VSAYQYRVFR

SEQ ID NO: 33970 - protein, 8 aa, Artificial Sequence
  Peptide Derived from Human Papillomavirus
VTPTSIFY

SEQ ID NO: 33971 - protein, 9 aa, Artificial Sequence
  Peptide Derived from Human Papillomavirus
VTPTSIFYH

SEQ ID NO: 33972 - protein, 10 aa, Artificial Sequence
  Peptide Derived from Human Papillomavirus
VTPTSIFYHA

SEQ ID NO: 33973 - protein, 8 aa, Artificial Sequence
  Peptide Derived from Human Papillomavirus
VTSDSQLF

SEQ ID NO: 33974 - protein, 10 aa, Artificial Sequence
  Peptide Derived from Human Papillomavirus
VTSDSQLFNK

SEQ ID NO: 33975 - protein, 10 aa, Artificial Sequence
  Peptide Derived from Human Papillomavirus
WACAGVEIGR

SEQ ID NO: 33976 - protein, 8 aa, Artificial Sequence
  Peptide Derived from Human Papillomavirus
WAKGTACK

SEQ ID NO: 33977 - protein, 10 aa, Artificial Sequence
  Peptide Derived from Human Papillomavirus
WAKGTACKSR

SEQ ID NO: 33978 - protein, 8 aa, Artificial Sequence
  Peptide Derived from Human Papillomavirus
WLHKAQGH

SEQ ID NO: 33979 - protein, 9 aa, Artificial Sequence
  Peptide Derived from Human Papillomavirus
YDATKFKQY

SEQ ID NO: 33980 - protein, 11 aa, Artificial Sequence
  Peptide Derived from Human Papillomavirus
YDATKFKQYSR

SEQ ID NO: 33981 - protein, 11 aa, Artificial Sequence
  Peptide Derived from Human Papillomavirus
YFRVPAGGGNK

SEQ ID NO: 33982 - protein, 10 aa, Artificial Sequence
  Peptide Derived from Human Papillomavirus
YGDSMFFCLR

SEQ ID NO: 33983 - protein, 11 aa, Artificial Sequence
  Peptide Derived from Human Papillomavirus
YGDSMFFCLRR

SEQ ID NO: 33984 - protein, 8 aa, Artificial Sequence
  Peptide Derived from Human Papillomavirus
YGPLYHPR

SEQ ID NO: 33985 - protein, 9 aa, Artificial Sequence
  Peptide Derived from Human Papillomavirus
YIKGTGMPA

SEQ ID NO: 33986 - protein, 8 aa, Artificial Sequence
  Peptide Derived from Human Papillomavirus
YLPPPSVA

SEQ ID NO: 33987 - protein, 9 aa, Artificial Sequence
  Peptide Derived from Human Papillomavirus
YLPPPSVAR

SEQ ID NO: 33988 - protein, 9 aa, Artificial Sequence
  Peptide Derived from Human Papillomavirus
YLQMSADPY

SEQ ID NO: 33989 - protein, 10 aa, Artificial Sequence
  Peptide Derived from Human Papillomavirus
YMVHIIICGH

SEQ ID NO: 33990 - protein, 11 aa, Artificial Sequence
  Peptide Derived from Human Papillomavirus
YMVHIIICGHY

SEQ ID NO: 33991 - protein, 8 aa, Artificial Sequence
  Peptide Derived from Human Papillomavirus
YSRHVEEY

SEQ ID NO: 33992 - protein, 8 aa, Artificial Sequence
  Peptide Derived from Human Papillomavirus
YTRVLILH

SEQ ID NO: 33993 - protein, 9 aa, Artificial Sequence
  Peptide Derived from Human Papillomavirus
YTRVLILHY

SEQ ID NO: 33994 - protein, 10 aa, Artificial Sequence
  Peptide Derived from Human Papillomavirus
YTRVLILHYH

SEQ ID NO: 33995 - protein, 8 aa, Artificial Sequence
  Peptide Derived from Human Papillomavirus
YVTPTSIF

SEQ ID NO: 33996 - protein, 9 aa, Artificial Sequence
  Peptide Derived from Human Papillomavirus
YVTPTSIFY

SEQ ID NO: 33997 - protein, 10 aa, Artificial Sequence
  Peptide Derived from Human Papillomavirus
YVTPTSIFYH

SEQ ID NO: 33998 - protein, 11 aa, Artificial Sequence
  Peptide Derived from Human Papillomavirus
YVTPTSIFYHA

SEQ ID NO: 33999 - protein, 11 aa, Artificial Sequence
  Peptide Derived from Human Papillomavirus
AFEPVDTTLTF

SEQ ID NO: 34000 - protein, 8 aa, Artificial Sequence
  Peptide Derived from Human Papillomavirus
AGPRLYSR

SEQ ID NO: 34001 - protein, 9 aa, Artificial Sequence
  Peptide Derived from Human Papillomavirus
AGPRLYSRA

SEQ ID NO: 34002 - protein, 10 aa, Artificial Sequence
  Peptide Derived from Human Papillomavirus
AGPRLYSRAY

SEQ ID NO: 34003 - protein, 10 aa, Artificial Sequence
  Peptide Derived from Human Papillomavirus
ALTSRRGTVR

SEQ ID NO: 34004 - protein, 11 aa, Artificial Sequence
  Peptide Derived from Human Papillomavirus
ALTSRRGTVRF

SEQ ID NO: 34005 - protein, 9 aa, Artificial Sequence
  Peptide Derived from Human Papillomavirus
ASTQYIGIH

SEQ ID NO: 34006 - protein, 8 aa, Artificial Sequence
  Peptide Derived from Human Papillomavirus
ASVTDLYK

SEQ ID NO: 34007 - protein, 11 aa, Artificial Sequence
  Peptide Derived from Human Papillomavirus
ASVTDLYKTCK

SEQ ID NO: 34008 - protein, 8 aa, Artificial Sequence
  Peptide Derived from Human Papillomavirus
ATEDNDLF

SEQ ID NO: 34009 - protein, 11 aa, Artificial Sequence
  Peptide Derived from Human Papillomavirus
ATEDNDLFDIY

SEQ ID NO: 34010 - protein, 9 aa, Artificial Sequence
  Peptide Derived from Human Papillomavirus
DFMDIIRLH

SEQ ID NO: 34011 - protein, 10 aa, Artificial Sequence
  Peptide Derived from Human Papillomavirus
DFMDIIRLHR

SEQ ID NO: 34012 - protein, 9 aa, Artificial Sequence
  Peptide Derived from Human Papillomavirus
DIIRLHRPA

SEQ ID NO: 34013 - protein, 11 aa, Artificial Sequence
  Peptide Derived from Human Papillomavirus
DISPIAPSPEY

SEQ ID NO: 34014 - protein, 11 aa, Artificial Sequence
  Peptide Derived from Human Papillomavirus
DITSAGTTTPA

SEQ ID NO: 34015 - protein, 10 aa, Artificial Sequence
  Peptide Derived from Human Papillomavirus
DIYADDMDPA

SEQ ID NO: 34016 - protein, 11 aa, Artificial Sequence
  Peptide Derived from Human Papillomavirus
DMDPAVPVPSR

SEQ ID NO: 34017 - protein, 9 aa, Artificial Sequence
  Peptide Derived from Human Papillomavirus
DSDFMDIIR

SEQ ID NO: 34018 - protein, 11 aa, Artificial Sequence
  Peptide Derived from Human Papillomavirus
DSDFMDIIRLH

SEQ ID NO: 34019 - protein, 9 aa, Artificial Sequence
  Peptide Derived from Human Papillomavirus
DSSVVTSGA

SEQ ID NO: 34020 - protein, 11 aa, Artificial Sequence
  Peptide Derived from Human Papillomavirus
DSSVVTSGAPR

SEQ ID NO: 34021 - protein, 9 aa, Artificial Sequence
  Peptide Derived from Human Papillomavirus
DTTLTFDPR

SEQ ID NO: 34022 - protein, 9 aa, Artificial Sequence
  Peptide Derived from Human Papillomavirus
EDNDLFDIY

SEQ ID NO: 34023 - protein, 10 aa, Artificial Sequence
  Peptide Derived from Human Papillomavirus
EDNDLFDIYA

SEQ ID NO: 34024 - protein, 10 aa, Artificial Sequence
  Peptide Derived from Human Papillomavirus
EDSSVVTSGA

SEQ ID NO: 34025 - protein, 8 aa, Artificial Sequence
  Peptide Derived from Human Papillomavirus
EGTTLADK

SEQ ID NO: 34026 - protein, 8 aa, Artificial Sequence
  Peptide Derived from Human Papillomavirus
EIPLQTFA

SEQ ID NO: 34027 - protein, 8 aa, Artificial Sequence
  Peptide Derived from Human Papillomavirus
ELQPLVSA

SEQ ID NO: 34028 - protein, 9 aa, Artificial Sequence
  Peptide Derived from Human Papillomavirus
EVPQTGEVA

SEQ ID NO: 34029 - protein, 8 aa, Artificial Sequence
  Peptide Derived from Human Papillomavirus
FADGFVAA

SEQ ID NO: 34030 - protein, 11 aa, Artificial Sequence
  Peptide Derived from Human Papillomavirus
FDIYADDMDPA

SEQ ID NO: 34031 - protein, 8 aa, Artificial Sequence
  Peptide Derived from Human Papillomavirus
FFADGFVA

SEQ ID NO: 34032 - protein, 9 aa, Artificial Sequence
  Peptide Derived from Human Papillomavirus
FFADGFVAA

SEQ ID NO: 34033 - protein, 11 aa, Artificial Sequence
  Peptide Derived from Human Papillomavirus
FFKYSPTISSA

SEQ ID NO: 34034 - protein, 8 aa, Artificial Sequence
  Peptide Derived from Human Papillomavirus
FIPKKRKR

SEQ ID NO: 34035 - protein, 11 aa, Artificial Sequence
  Peptide Derived from Human Papillomavirus
FIPKKRKRVPY

SEQ ID NO: 34036 - protein, 11 aa, Artificial Sequence
  Peptide Derived from Human Papillomavirus
FLTRPSSLITY

SEQ ID NO: 34037 - protein, 8 aa, Artificial Sequence
  Peptide Derived from Human Papillomavirus
FMDIIRLH

SEQ ID NO: 34038 - protein, 9 aa, Artificial Sequence
  Peptide Derived from Human Papillomavirus
FMDIIRLHR

SEQ ID NO: 34039 - protein, 11 aa, Artificial Sequence
  Peptide Derived from Human Papillomavirus
FMDIIRLHRPA

SEQ ID NO: 34040 - protein, 8 aa, Artificial Sequence
  Peptide Derived from Human Papillomavirus
FSRLGQRA

SEQ ID NO: 34041 - protein, 11 aa, Artificial Sequence
  Peptide Derived from Human Papillomavirus
FSRLGQRATMF

SEQ ID NO: 34042 - protein, 10 aa, Artificial Sequence
  Peptide Derived from Human Papillomavirus
FTRSGTQIGA

SEQ ID NO: 34043 - protein, 11 aa, Artificial Sequence
  Peptide Derived from Human Papillomavirus
FTRSGTQIGAR

SEQ ID NO: 34044 - protein, 10 aa, Artificial Sequence
  Peptide Derived from Human Papillomavirus
FVGTPTSGTH

SEQ ID NO: 34045 - protein, 8 aa, Artificial Sequence
  Peptide Derived from Human Papillomavirus
GARVHFYH

SEQ ID NO: 34046 - protein, 11 aa, Artificial Sequence
  Peptide Derived from Human Papillomavirus
GIGTGSGTGGR

SEQ ID NO: 34047 - protein, 8 aa, Artificial Sequence
  Peptide Derived from Human Papillomavirus
GIHGTHYY

SEQ ID NO: 34048 - protein, 10 aa, Artificial Sequence
  Peptide Derived from Human Papillomavirus
GSGTGGRTGY

SEQ ID NO: 34049 - protein, 10 aa, Artificial Sequence
  Peptide Derived from Human Papillomavirus
GTCPPDVVPK

SEQ ID NO: 34050 - protein, 8 aa, Artificial Sequence
  Peptide Derived from Human Papillomavirus
GTGGRTGY

SEQ ID NO: 34051 - protein, 9 aa, Artificial Sequence
  Peptide Derived from Human Papillomavirus
GTGSGTGGR

SEQ ID NO: 34052 - protein, 10 aa, Artificial Sequence
  Peptide Derived from Human Papillomavirus
GTHYYLWPLY

SEQ ID NO: 34053 - protein, 11 aa, Artificial Sequence
  Peptide Derived from Human Papillomavirus
GTHYYLWPLYY

SEQ ID NO: 34054 - protein, 8 aa, Artificial Sequence
  Peptide Derived from Human Papillomavirus
GTPTSGTH

SEQ ID NO: 34055 - protein, 10 aa, Artificial Sequence
  Peptide Derived from Human Papillomavirus
GTPTSGTHGY

SEQ ID NO: 34056 - protein, 9 aa, Artificial Sequence
  Peptide Derived from Human Papillomavirus
GTQIGARVH

SEQ ID NO: 34057 - protein, 10 aa, Artificial Sequence
  Peptide Derived from Human Papillomavirus
GTQIGARVHF

SEQ ID NO: 34058 - protein, 11 aa, Artificial Sequence
  Peptide Derived from Human Papillomavirus
GTQIGARVHFY

SEQ ID NO: 34059 - protein, 10 aa, Artificial Sequence
  Peptide Derived from Human Papillomavirus
GTSGFDITSA

SEQ ID NO: 34060 - protein, 11 aa, Artificial Sequence
  Peptide Derived from Human Papillomavirus
GTVRFSRLGQR

SEQ ID NO: 34061 - protein, 10 aa, Artificial Sequence
  Peptide Derived from Human Papillomavirus
HFYHDISPIA

SEQ ID NO: 34062 - protein, 11 aa, Artificial Sequence
  Peptide Derived from Human Papillomavirus
HGTHYYLWPLY

SEQ ID NO: 34063 - protein, 11 aa, Artificial Sequence
  Peptide Derived from Human Papillomavirus
HGYEEIPLQTF

SEQ ID NO: 34064 - protein, 8 aa, Artificial Sequence
  Peptide Derived from Human Papillomavirus
IGARVHFY

SEQ ID NO: 34065 - protein, 9 aa, Artificial Sequence
  Peptide Derived from Human Papillomavirus
IGARVHFYH

SEQ ID NO: 34066 - protein, 8 aa, Artificial Sequence
  Peptide Derived from Human Papillomavirus
IGIHGTHY

SEQ ID NO: 34067 - protein, 9 aa, Artificial Sequence
  Peptide Derived from Human Papillomavirus
IGIHGTHYY

SEQ ID NO: 34068 - protein, 10 aa, Artificial Sequence
  Peptide Derived from Human Papillomavirus
IGTGSGTGGR

SEQ ID NO: 34069 - protein, 11 aa, Artificial Sequence
  Peptide Derived from Human Papillomavirus
IIEVPQTGEVA

SEQ ID NO: 34070 - protein, 8 aa, Artificial Sequence
  Peptide Derived from Human Papillomavirus
IIRLHRPA

SEQ ID NO: 34071 - protein, 10 aa, Artificial Sequence
  Peptide Derived from Human Papillomavirus
ILQWSSLGIF

SEQ ID NO: 34072 - protein, 10 aa, Artificial Sequence
  Peptide Derived from Human Papillomavirus
ISPIAPSPEY

SEQ ID NO: 34073 - protein, 10 aa, Artificial Sequence
  Peptide Derived from Human Papillomavirus
ISSTPLPTVR

SEQ ID NO: 34074 - protein, 11 aa, Artificial Sequence
  Peptide Derived from Human Papillomavirus
ISSTPLPTVRR

SEQ ID NO: 34075 - protein, 10 aa, Artificial Sequence
  Peptide Derived from Human Papillomavirus
ISTTNFTNPA

SEQ ID NO: 34076 - protein, 11 aa, Artificial Sequence
  Peptide Derived from Human Papillomavirus
ISTTNFTNPAF

SEQ ID NO: 34077 - protein, 10 aa, Artificial Sequence
  Peptide Derived from Human Papillomavirus
ITSAGTTTPA

SEQ ID NO: 34078 - protein, 8 aa, Artificial Sequence
  Peptide Derived from Human Papillomavirus
ITYDNPAF

SEQ ID NO: 34079 - protein, 8 aa, Artificial Sequence
  Peptide Derived from Human Papillomavirus
IVSPTAPA

SEQ ID NO: 34080 - protein, 11 aa, Artificial Sequence
  Peptide Derived from Human Papillomavirus
KILQWSSLGIF

SEQ ID NO: 34081 - protein, 8 aa, Artificial Sequence
  Peptide Derived from Human Papillomavirus
KVEGTTLA

SEQ ID NO: 34082 - protein, 10 aa, Artificial Sequence
  Peptide Derived from Human Papillomavirus
KVEGTTLADK

SEQ ID NO: 34083 - protein, 8 aa, Artificial Sequence
  Peptide Derived from Human Papillomavirus
LGQRATMF

SEQ ID NO: 34084 - protein, 10 aa, Artificial Sequence
  Peptide Derived from Human Papillomavirus
LGQRATMFTR

SEQ ID NO: 34085 - protein, 8 aa, Artificial Sequence
  Peptide Derived from Human Papillomavirus
LITYDNPA

SEQ ID NO: 34086 - protein, 9 aa, Artificial Sequence
  Peptide Derived from Human Papillomavirus
LITYDNPAF

SEQ ID NO: 34087 - protein, 10 aa, Artificial Sequence
  Peptide Derived from Human Papillomavirus
LTRPSSLITY

SEQ ID NO: 34088 - protein, 9 aa, Artificial Sequence
  Peptide Derived from Human Papillomavirus
LTSRRGTVR

SEQ ID NO: 34089 - protein, 10 aa, Artificial Sequence
  Peptide Derived from Human Papillomavirus
LTSRRGTVRF

SEQ ID NO: 34090 - protein, 10 aa, Artificial Sequence
  Peptide Derived from Human Papillomavirus
LTSSWDVPVY

SEQ ID NO: 34091 - protein, 11 aa, Artificial Sequence
  Peptide Derived from Human Papillomavirus
LVSATEDNDLF

SEQ ID NO: 34092 - protein, 8 aa, Artificial Sequence
  Peptide Derived from Human Papillomavirus
MDIIRLHR

SEQ ID NO: 34093 - protein, 10 aa, Artificial Sequence
  Peptide Derived from Human Papillomavirus
MDIIRLHRPA

SEQ ID NO: 34094 - protein, 10 aa, Artificial Sequence
  Peptide Derived from Human Papillomavirus
MDPAVPVPSR

SEQ ID NO: 34095 - protein, 11 aa, Artificial Sequence
  Peptide Derived from Human Papillomavirus
MFTRSGTQIGA

SEQ ID NO: 34096 - protein, 8 aa, Artificial Sequence
  Peptide Derived from Human Papillomavirus
MVSHRAAR

SEQ ID NO: 34097 - protein, 9 aa, Artificial Sequence
  Peptide Derived from Human Papillomavirus
MVSHRAARR

SEQ ID NO: 34098 - protein, 10 aa, Artificial Sequence
  Peptide Derived from Human Papillomavirus
MVSHRAARRK

SEQ ID NO: 34099 - protein, 11 aa, Artificial Sequence
  Peptide Derived from Human Papillomavirus
MVSHRAARRKR

SEQ ID NO: 34100 - protein, 8 aa, Artificial Sequence
  Peptide Derived from Human Papillomavirus
NDLFDIYA

SEQ ID NO: 34101 - protein, 10 aa, Artificial Sequence
  Peptide Derived from Human Papillomavirus
NTVVDVGPTR

SEQ ID NO: 34102 - protein, 11 aa, Artificial Sequence
  Peptide Derived from Human Papillomavirus
PALTSRRGTVR

SEQ ID NO: 34103 - protein, 10 aa, Artificial Sequence
  Peptide Derived from Human Papillomavirus
PASTQYIGIH

SEQ ID NO: 34104 - protein, 8 aa, Artificial Sequence
  Peptide Derived from Human Papillomavirus
PAVPVPSR

SEQ ID NO: 34105 - protein, 10 aa, Artificial Sequence
  Peptide Derived from Human Papillomavirus
PDSDFMDIIR

SEQ ID NO: 34106 - protein, 8 aa, Artificial Sequence
  Peptide Derived from Human Papillomavirus
PIAPSPEY

SEQ ID NO: 34107 - protein, 11 aa, Artificial Sequence
  Peptide Derived from Human Papillomavirus
PISSTPLPTVR

SEQ ID NO: 34108 - protein, 9 aa, Artificial Sequence
  Peptide Derived from Human Papillomavirus
PIVSPTAPA

SEQ ID NO: 34109 - protein, 9 aa, Artificial Sequence
  Peptide Derived from Human Papillomavirus
PLPTVRRVA

SEQ ID NO: 34110 - protein, 11 aa, Artificial Sequence
  Peptide Derived from Human Papillomavirus
PLTSSWDVPVY

SEQ ID NO: 34111 - protein, 8 aa, Artificial Sequence
  Peptide Derived from Human Papillomavirus
PLYYFIPK

SEQ ID NO: 34112 - protein, 9 aa, Artificial Sequence
  Peptide Derived from Human Papillomavirus
PLYYFIPKK

SEQ ID NO: 34113 - protein, 10 aa, Artificial Sequence
  Peptide Derived from Human Papillomavirus
PLYYFIPKKR

SEQ ID NO: 34114 - protein, 11 aa, Artificial Sequence
  Peptide Derived from Human Papillomavirus
PLYYFIPKKRK

SEQ ID NO: 34115 - protein, 8 aa, Artificial Sequence
  Peptide Derived from Human Papillomavirus
PSRSTTSF

SEQ ID NO: 34116 - protein, 9 aa, Artificial Sequence
  Peptide Derived from Human Papillomavirus
PSRSTTSFA

SEQ ID NO: 34117 - protein, 10 aa, Artificial Sequence
  Peptide Derived from Human Papillomavirus
PSRSTTSFAF

SEQ ID NO: 34118 - protein, 11 aa, Artificial Sequence
  Peptide Derived from Human Papillomavirus
PSRSTTSFAFF

SEQ ID NO: 34119 - protein, 11 aa, Artificial Sequence
  Peptide Derived from Human Papillomavirus
PSSLITYDNPA

SEQ ID NO: 34120 - protein, 9 aa, Artificial Sequence
  Peptide Derived from Human Papillomavirus
PTAPASTQY

SEQ ID NO: 34121 - protein, 9 aa, Artificial Sequence
  Peptide Derived from Human Papillomavirus
PTFTGTSGF

SEQ ID NO: 34122 - protein, 9 aa, Artificial Sequence
  Peptide Derived from Human Papillomavirus
PTISSASSY

SEQ ID NO: 34123 - protein, 8 aa, Artificial Sequence
  Peptide Derived from Human Papillomavirus
PTSGTHGY

SEQ ID NO: 34124 - protein, 10 aa, Artificial Sequence
  Peptide Derived from Human Papillomavirus
PTVRRVAGPR

SEQ ID NO: 34125 - protein, 8 aa, Artificial Sequence
  Peptide Derived from Human Papillomavirus
PVDTTLTF

SEQ ID NO: 34126 - protein, 11 aa, Artificial Sequence
  Peptide Derived from Human Papillomavirus
PVDTTLTFDPR

SEQ ID NO: 34127 - protein, 10 aa, Artificial Sequence
  Peptide Derived from Human Papillomavirus
PVPSRSTTSF

SEQ ID NO: 34128 - protein, 11 aa, Artificial Sequence
  Peptide Derived from Human Papillomavirus
PVPSRSTTSFA

SEQ ID NO: 34129 - protein, 8 aa, Artificial Sequence
  Peptide Derived from Human Papillomavirus
QIGARVHF

SEQ ID NO: 34130 - protein, 9 aa, Artificial Sequence
  Peptide Derived from Human Papillomavirus
QIGARVHFY

SEQ ID NO: 34131 - protein, 10 aa, Artificial Sequence
  Peptide Derived from Human Papillomavirus
QIGARVHFYH

SEQ ID NO: 34132 - protein, 10 aa, Artificial Sequence
  Peptide Derived from Human Papillomavirus
QTGEVAGNVF

SEQ ID NO: 34133 - protein, 9 aa, Artificial Sequence
  Peptide Derived from Human Papillomavirus
QVSVANPEF

SEQ ID NO: 34134 - protein, 8 aa, Artificial Sequence
  Peptide Derived from Human Papillomavirus
RAARRKRA

SEQ ID NO: 34135 - protein, 8 aa, Artificial Sequence
  Peptide Derived from Human Papillomavirus
RASVTDLY

SEQ ID NO: 34136 - protein, 9 aa, Artificial Sequence
  Peptide Derived from Human Papillomavirus
RASVTDLYK

SEQ ID NO: 34137 - protein, 9 aa, Artificial Sequence
  Peptide Derived from Human Papillomavirus
RAYQQVSVA

SEQ ID NO: 34138 - protein, 8 aa, Artificial Sequence
  Peptide Derived from Human Papillomavirus
RFSRLGQR

SEQ ID NO: 34139 - protein, 9 aa, Artificial Sequence
  Peptide Derived from Human Papillomavirus
RFSRLGQRA

SEQ ID NO: 34140 - protein, 8 aa, Artificial Sequence
  Peptide Derived from Human Papillomavirus
RGTVRFSR

SEQ ID NO: 34141 - protein, 9 aa, Artificial Sequence
  Peptide Derived from Human Papillomavirus
RLGQRATMF

SEQ ID NO: 34142 - protein, 11 aa, Artificial Sequence
  Peptide Derived from Human Papillomavirus
RLGQRATMFTR

SEQ ID NO: 34143 - protein, 10 aa, Artificial Sequence
  Peptide Derived from Human Papillomavirus
RLHRPALTSR

SEQ ID NO: 34144 - protein, 11 aa, Artificial Sequence
  Peptide Derived from Human Papillomavirus
RLHRPALTSRR

SEQ ID NO: 34145 - protein, 9 aa, Artificial Sequence
  Peptide Derived from Human Papillomavirus
RSDVPDSDF

SEQ ID NO: 34146 - protein, 8 aa, Artificial Sequence
  Peptide Derived from Human Papillomavirus
RSGTQIGA

SEQ ID NO: 34147 - protein, 9 aa, Artificial Sequence
  Peptide Derived from Human Papillomavirus
RSGTQIGAR

SEQ ID NO: 34148 - protein, 11 aa, Artificial Sequence
  Peptide Derived from Human Papillomavirus
RSGTQIGARVH

SEQ ID NO: 34149 - protein, 8 aa, Artificial Sequence
  Peptide Derived from Human Papillomavirus
RSTTSFAF

SEQ ID NO: 34150 - protein, 9 aa, Artificial Sequence
  Peptide Derived from Human Papillomavirus
RSTTSFAFF

SEQ ID NO: 34151 - protein, 10 aa, Artificial Sequence
  Peptide Derived from Human Papillomavirus
RSTTSFAFFK

SEQ ID NO: 34152 - protein, 11 aa, Artificial Sequence
  Peptide Derived from Human Papillomavirus
RSTTSFAFFKY

SEQ ID NO: 34153 - protein, 10 aa, Artificial Sequence
  Peptide Derived from Human Papillomavirus
RTGYIPLGGR

SEQ ID NO: 34154 - protein, 8 aa, Artificial Sequence
  Peptide Derived from Human Papillomavirus
RVAGPRLY

SEQ ID NO: 34155 - protein, 10 aa, Artificial Sequence
  Peptide Derived from Human Papillomavirus
RVAGPRLYSR

SEQ ID NO: 34156 - protein, 11 aa, Artificial Sequence
  Peptide Derived from Human Papillomavirus
RVAGPRLYSRA

SEQ ID NO: 34157 - protein, 10 aa, Artificial Sequence
  Peptide Derived from Human Papillomavirus
RVPYFFADGF

SEQ ID NO: 34158 - protein, 8 aa, Artificial Sequence
  Peptide Derived from Human Papillomavirus
SAGTTTPA

SEQ ID NO: 34159 - protein, 9 aa, Artificial Sequence
  Peptide Derived from Human Papillomavirus
SATEDNDLF

SEQ ID NO: 34160 - protein, 8 aa, Artificial Sequence
  Peptide Derived from Human Papillomavirus
SDFMDIIR

SEQ ID NO: 34161 - protein, 10 aa, Artificial Sequence
  Peptide Derived from Human Papillomavirus
SDFMDIIRLH

SEQ ID NO: 34162 - protein, 11 aa, Artificial Sequence
  Peptide Derived from Human Papillomavirus
SDFMDIIRLHR

SEQ ID NO: 34163 - protein, 8 aa, Artificial Sequence
  Peptide Derived from Human Papillomavirus
SDVPDSDF

SEQ ID NO: 34164 - protein, 8 aa, Artificial Sequence
  Peptide Derived from Human Papillomavirus
SGAPRPTF

SEQ ID NO: 34165 - protein, 8 aa, Artificial Sequence
  Peptide Derived from Human Papillomavirus
SGFDITSA

SEQ ID NO: 34166 - protein, 11 aa, Artificial Sequence
  Peptide Derived from Human Papillomavirus
SGTCPPDVVPK

SEQ ID NO: 34167 - protein, 9 aa, Artificial Sequence
  Peptide Derived from Human Papillomavirus
SGTGGRTGY

SEQ ID NO: 34168 - protein, 8 aa, Artificial Sequence
  Peptide Derived from Human Papillomavirus
SGTQIGAR

SEQ ID NO: 34169 - protein, 10 aa, Artificial Sequence
  Peptide Derived from Human Papillomavirus
SGTQIGARVH

SEQ ID NO: 34170 - protein, 11 aa, Artificial Sequence
  Peptide Derived from Human Papillomavirus
SGTQIGARVHF

SEQ ID NO: 34171 - protein, 11 aa, Artificial Sequence
  Peptide Derived from Human Papillomavirus
SISTTNFTNPA

SEQ ID NO: 34172 - protein, 9 aa, Artificial Sequence
  Peptide Derived from Human Papillomavirus
SLITYDNPA

SEQ ID NO: 34173 - protein, 10 aa, Artificial Sequence
  Peptide Derived from Human Papillomavirus
SLITYDNPAF

SEQ ID NO: 34174 - protein, 10 aa, Artificial Sequence
  Peptide Derived from Human Papillomavirus
SSLITYDNPA

SEQ ID NO: 34175 - protein, 11 aa, Artificial Sequence
  Peptide Derived from Human Papillomavirus
SSLITYDNPAF

SEQ ID NO: 34176 - protein, 9 aa, Artificial Sequence
  Peptide Derived from Human Papillomavirus
SSTPLPTVR

SEQ ID NO: 34177 - protein, 10 aa, Artificial Sequence
  Peptide Derived from Human Papillomavirus
SSTPLPTVRR

SEQ ID NO: 34178 - protein, 8 aa, Artificial Sequence
  Peptide Derived from Human Papillomavirus
SSVVTSGA

SEQ ID NO: 34179 - protein, 10 aa, Artificial Sequence
  Peptide Derived from Human Papillomavirus
SSVVTSGAPR

SEQ ID NO: 34180 - protein, 8 aa, Artificial Sequence
  Peptide Derived from Human Papillomavirus
SSWDVPVY

SEQ ID NO: 34181 - protein, 8 aa, Artificial Sequence
  Peptide Derived from Human Papillomavirus
STPLPTVR

SEQ ID NO: 34182 - protein, 9 aa, Artificial Sequence
  Peptide Derived from Human Papillomavirus
STPLPTVRR

SEQ ID NO: 34183 - protein, 11 aa, Artificial Sequence
  Peptide Derived from Human Papillomavirus
STPLPTVRRVA

SEQ ID NO: 34184 - protein, 8 aa, Artificial Sequence
  Peptide Derived from Human Papillomavirus
STQYIGIH

SEQ ID NO: 34185 - protein, 11 aa, Artificial Sequence
  Peptide Derived from Human Papillomavirus
STQYIGIHGTH

SEQ ID NO: 34186 - protein, 11 aa, Artificial Sequence
  Peptide Derived from Human Papillomavirus
STSVSISTTNF

SEQ ID NO: 34187 - protein, 9 aa, Artificial Sequence
  Peptide Derived from Human Papillomavirus
STTNFTNPA

SEQ ID NO: 34188 - protein, 10 aa, Artificial Sequence
  Peptide Derived from Human Papillomavirus
STTNFTNPAF

SEQ ID NO: 34189 - protein, 8 aa, Artificial Sequence
  Peptide Derived from Human Papillomavirus
STTSFAFF

SEQ ID NO: 34190 - protein, 9 aa, Artificial Sequence
  Peptide Derived from Human Papillomavirus
STTSFAFFK

SEQ ID NO: 34191 - protein, 10 aa, Artificial Sequence
  Peptide Derived from Human Papillomavirus
STTSFAFFKY

SEQ ID NO: 34192 - protein, 10 aa, Artificial Sequence
  Peptide Derived from Human Papillomavirus
SVANPEFLTR

SEQ ID NO: 34193 - protein, 9 aa, Artificial Sequence
  Peptide Derived from Human Papillomavirus
SVSISTTNF

SEQ ID NO: 34194 - protein, 10 aa, Artificial Sequence
  Peptide Derived from Human Papillomavirus
SVTDLYKTCK

SEQ ID NO: 34195 - protein, 9 aa, Artificial Sequence
  Peptide Derived from Human Papillomavirus
SVVTSGAPR

SEQ ID NO: 34196 - protein, 10 aa, Artificial Sequence
  Peptide Derived from Human Papillomavirus
SVWPIVSPTA

SEQ ID NO: 34197 - protein, 8 aa, Artificial Sequence
  Peptide Derived from Human Papillomavirus
TAPASTQY

SEQ ID NO: 34198 - protein, 9 aa, Artificial Sequence
  Peptide Derived from Human Papillomavirus
TCPPDVVPK

SEQ ID NO: 34199 - protein, 8 aa, Artificial Sequence
  Peptide Derived from Human Papillomavirus
TDLYKTCK

SEQ ID NO: 34200 - protein, 8 aa, Artificial Sequence
  Peptide Derived from Human Papillomavirus
TFTGTSGF

SEQ ID NO: 34201 - protein, 9 aa, Artificial Sequence
  Peptide Derived from Human Papillomavirus
TGEVAGNVF

SEQ ID NO: 34202 - protein, 8 aa, Artificial Sequence
  Peptide Derived from Human Papillomavirus
TGSGTGGR

SEQ ID NO: 34203 - protein, 11 aa, Artificial Sequence
  Peptide Derived from Human Papillomavirus
TGSGTGGRTGY

SEQ ID NO: 34204 - protein, 11 aa, Artificial Sequence
  Peptide Derived from Human Papillomavirus
TGTSGFDITSA

SEQ ID NO: 34205 - protein, 9 aa, Artificial Sequence
  Peptide Derived from Human Papillomavirus
TGYIPLGGR

SEQ ID NO: 34206 - protein, 8 aa, Artificial Sequence
  Peptide Derived from Human Papillomavirus
TISSASSY

SEQ ID NO: 34207 - protein, 9 aa, Artificial Sequence
  Peptide Derived from Human Papillomavirus
TSAGTTTPA

SEQ ID NO: 34208 - protein, 8 aa, Artificial Sequence
  Peptide Derived from Human Papillomavirus
TSFAFFKY

SEQ ID NO: 34209 - protein, 9 aa, Artificial Sequence
  Peptide Derived from Human Papillomavirus
TSGAPRPTF

SEQ ID NO: 34210 - protein, 9 aa, Artificial Sequence
  Peptide Derived from Human Papillomavirus
TSGFDITSA

SEQ ID NO: 34211 - protein, 8 aa, Artificial Sequence
  Peptide Derived from Human Papillomavirus
TSRRGTVR

SEQ ID NO: 34212 - protein, 9 aa, Artificial Sequence
  Peptide Derived from Human Papillomavirus
TSRRGTVRF

SEQ ID NO: 34213 - protein, 11 aa, Artificial Sequence
  Peptide Derived from Human Papillomavirus
TSRRGTVRFSR

SEQ ID NO: 34214 - protein, 9 aa, Artificial Sequence
  Peptide Derived from Human Papillomavirus
TSSWDVPVY

SEQ ID NO: 34215 - protein, 10 aa, Artificial Sequence
  Peptide Derived from Human Papillomavirus
TSVSISTTNF

SEQ ID NO: 34216 - protein, 11 aa, Artificial Sequence
  Peptide Derived from Human Papillomavirus
TSVWPIVSPTA

SEQ ID NO: 34217 - protein, 8 aa, Artificial Sequence
  Peptide Derived from Human Papillomavirus
TTLTFDPR

SEQ ID NO: 34218 - protein, 8 aa, Artificial Sequence
  Peptide Derived from Human Papillomavirus
TTNFTNPA

SEQ ID NO: 34219 - protein, 9 aa, Artificial Sequence
  Peptide Derived from Human Papillomavirus
TTNFTNPAF

SEQ ID NO: 34220 - protein, 8 aa, Artificial Sequence
  Peptide Derived from Human Papillomavirus
TTSFAFFK

SEQ ID NO: 34221 - protein, 9 aa, Artificial Sequence
  Peptide Derived from Human Papillomavirus
TTSFAFFKY

SEQ ID NO: 34222 - protein, 10 aa, Artificial Sequence
  Peptide Derived from Human Papillomavirus
TVRFSRLGQR

SEQ ID NO: 34223 - protein, 11 aa, Artificial Sequence
  Peptide Derived from Human Papillomavirus
TVRFSRLGQRA

SEQ ID NO: 34224 - protein, 9 aa, Artificial Sequence
  Peptide Derived from Human Papillomavirus
TVRRVAGPR

SEQ ID NO: 34225 - protein, 11 aa, Artificial Sequence
  Peptide Derived from Human Papillomavirus
TVRRVAGPRLY

SEQ ID NO: 34226 - protein, 9 aa, Artificial Sequence
  Peptide Derived from Human Papillomavirus
TVVDVGPTR

SEQ ID NO: 34227 - protein, 9 aa, Artificial Sequence
  Peptide Derived from Human Papillomavirus
VAGPRLYSR

SEQ ID NO: 34228 - protein, 10 aa, Artificial Sequence
  Peptide Derived from Human Papillomavirus
VAGPRLYSRA

SEQ ID NO: 34229 - protein, 11 aa, Artificial Sequence
  Peptide Derived from Human Papillomavirus
VAGPRLYSRAY

SEQ ID NO: 34230 - protein, 9 aa, Artificial Sequence
  Peptide Derived from Human Papillomavirus
VANPEFLTR

SEQ ID NO: 34231 - protein, 10 aa, Artificial Sequence
  Peptide Derived from Human Papillomavirus
VDTTLTFDPR

SEQ ID NO: 34232 - protein, 11 aa, Artificial Sequence
  Peptide Derived from Human Papillomavirus
VFVGTPTSGTH

SEQ ID NO: 34233 - protein, 9 aa, Artificial Sequence
  Peptide Derived from Human Papillomavirus
VGTPTSGTH

SEQ ID NO: 34234 - protein, 11 aa, Artificial Sequence
  Peptide Derived from Human Papillomavirus
VGTPTSGTHGY

SEQ ID NO: 34235 - protein, 10 aa, Artificial Sequence
  Peptide Derived from Human Papillomavirus
VSATEDNDLF

SEQ ID NO: 34236 - protein, 8 aa, Artificial Sequence
  Peptide Derived from Human Papillomavirus
VSHRAARR

SEQ ID NO: 34237 - protein, 9 aa, Artificial Sequence
  Peptide Derived from Human Papillomavirus
VSHRAARRK

SEQ ID NO: 34238 - protein, 10 aa, Artificial Sequence
  Peptide Derived from Human Papillomavirus
VSHRAARRKR

SEQ ID NO: 34239 - protein, 11 aa, Artificial Sequence
  Peptide Derived from Human Papillomavirus
VSHRAARRKRA

SEQ ID NO: 34240 - protein, 8 aa, Artificial Sequence
  Peptide Derived from Human Papillomavirus
VSISTTNF

SEQ ID NO: 34241 - protein, 11 aa, Artificial Sequence
  Peptide Derived from Human Papillomavirus
VSPTAPASTQY

SEQ ID NO: 34242 - protein, 8 aa, Artificial Sequence
  Peptide Derived from Human Papillomavirus
VSVANPEF

SEQ ID NO: 34243 - protein, 11 aa, Artificial Sequence
  Peptide Derived from Human Papillomavirus
VSVANPEFLTR

SEQ ID NO: 34244 - protein, 9 aa, Artificial Sequence
  Peptide Derived from Human Papillomavirus
VTDLYKTCK

SEQ ID NO: 34245 - protein, 10 aa, Artificial Sequence
  Peptide Derived from Human Papillomavirus
VTSGAPRPTF

SEQ ID NO: 34246 - protein, 8 aa, Artificial Sequence
  Peptide Derived from Human Papillomavirus
VVDVGPTR

SEQ ID NO: 34247 - protein, 11 aa, Artificial Sequence
  Peptide Derived from Human Papillomavirus
VVPKVEGTTLA

SEQ ID NO: 34248 - protein, 8 aa, Artificial Sequence
  Peptide Derived from Human Papillomavirus
VVTSGAPR

SEQ ID NO: 34249 - protein, 11 aa, Artificial Sequence
  Peptide Derived from Human Papillomavirus
VVTSGAPRPTF

SEQ ID NO: 34250 - protein, 8 aa, Artificial Sequence
  Peptide Derived from Human Papillomavirus
YADDMDPA

SEQ ID NO: 34251 - protein, 9 aa, Artificial Sequence
  Peptide Derived from Human Papillomavirus
YFFADGFVA

SEQ ID NO: 34252 - protein, 10 aa, Artificial Sequence
  Peptide Derived from Human Papillomavirus
YFFADGFVAA

SEQ ID NO: 34253 - protein, 8 aa, Artificial Sequence
  Peptide Derived from Human Papillomavirus
YFIPKKRK

SEQ ID NO: 34254 - protein, 9 aa, Artificial Sequence
  Peptide Derived from Human Papillomavirus
YFIPKKRKR

SEQ ID NO: 34255 - protein, 10 aa, Artificial Sequence
  Peptide Derived from Human Papillomavirus
YIELQPLVSA

SEQ ID NO: 34256 - protein, 8 aa, Artificial Sequence
  Peptide Derived from Human Papillomavirus
YIGIHGTH

SEQ ID NO: 34257 - protein, 9 aa, Artificial Sequence
  Peptide Derived from Human Papillomavirus
YIGIHGTHY

SEQ ID NO: 34258 - protein, 10 aa, Artificial Sequence
  Peptide Derived from Human Papillomavirus
YIGIHGTHYY

SEQ ID NO: 34259 - protein, 8 aa, Artificial Sequence
  Peptide Derived from Human Papillomavirus
YLWPLYYF

SEQ ID NO: 34260 - protein, 11 aa, Artificial Sequence
  Peptide Derived from Human Papillomavirus
YLWPLYYFIPK

SEQ ID NO: 34261 - protein, 8 aa, Artificial Sequence
  Peptide Derived from Human Papillomavirus
YSPTISSA

SEQ ID NO: 34262 - protein, 11 aa, Artificial Sequence
  Peptide Derived from Human Papillomavirus
YSPTISSASSY

SEQ ID NO: 34263 - protein, 11 aa, Artificial Sequence
  Peptide Derived from Human Papillomavirus
YSRAYQQVSVA

SEQ ID NO: 34264 - protein, 8 aa, Artificial Sequence
  Peptide Derived from Human Papillomavirus
AAALYWYR

SEQ ID NO: 34265 - protein, 10 aa, Artificial Sequence
  Peptide Derived from Human Papillomavirus
AAFGVTGTVA

SEQ ID NO: 34266 - protein, 8 aa, Artificial Sequence
  Peptide Derived from Human Papillomavirus
AAMLGKFK

SEQ ID NO: 34267 - protein, 11 aa, Artificial Sequence
  Peptide Derived from Human Papillomavirus
AAMLGKFKELY

SEQ ID NO: 34268 - protein, 11 aa, Artificial Sequence
  Peptide Derived from Human Papillomavirus
ACAFLKSNSQA

SEQ ID NO: 34269 - protein, 11 aa, Artificial Sequence
  Peptide Derived from Human Papillomavirus
ADAKIGMLDDA

SEQ ID NO: 34270 - protein, 9 aa, Artificial Sequence
  Peptide Derived from Human Papillomavirus
ADSDSNACA

SEQ ID NO: 34271 - protein, 10 aa, Artificial Sequence
  Peptide Derived from Human Papillomavirus
ADSDSNACAF

SEQ ID NO: 34272 - protein, 9 aa, Artificial Sequence
  Peptide Derived from Human Papillomavirus
AFGVTGTVA

SEQ ID NO: 34273 - protein, 9 aa, Artificial Sequence
  Peptide Derived from Human Papillomavirus
AFLKSNSQA

SEQ ID NO: 34274 - protein, 10 aa, Artificial Sequence
  Peptide Derived from Human Papillomavirus
AFLKSNSQAK

SEQ ID NO: 34275 - protein, 9 aa, Artificial Sequence
  Peptide Derived from Human Papillomavirus
AGKDDRWPY

SEQ ID NO: 34276 - protein, 11 aa, Artificial Sequence
  Peptide Derived from Human Papillomavirus
AGKDDRWPYLH

SEQ ID NO: 34277 - protein, 9 aa, Artificial Sequence
  Peptide Derived from Human Papillomavirus
AICIENNSK

SEQ ID NO: 34278 - protein, 11 aa, Artificial Sequence
  Peptide Derived from Human Papillomavirus
AICIENNSKTA

SEQ ID NO: 34279 - protein, 8 aa, Artificial Sequence
  Peptide Derived from Human Papillomavirus
ALFHAQEA

SEQ ID NO: 34280 - protein, 11 aa, Artificial Sequence
  Peptide Derived from Human Papillomavirus
ALFHAQEAEEH

SEQ ID NO: 34281 - protein, 11 aa, Artificial Sequence
  Peptide Derived from Human Papillomavirus
ALKLFLKGVPK

SEQ ID NO: 34282 - protein, 10 aa, Artificial Sequence
  Peptide Derived from Human Papillomavirus
AMLGKFKELY

SEQ ID NO: 34283 - protein, 8 aa, Artificial Sequence
  Peptide Derived from Human Papillomavirus
ATTPCWHY

SEQ ID NO: 34284 - protein, 8 aa, Artificial Sequence
  Peptide Derived from Human Papillomavirus
AVQVLKRK

SEQ ID NO: 34285 - protein, 9 aa, Artificial Sequence
  Peptide Derived from Human Papillomavirus
AVQVLKRKY

SEQ ID NO: 34286 - protein, 10 aa, Artificial Sequence
  Peptide Derived from Human Papillomavirus
CAFLKSNSQA

SEQ ID NO: 34287 - protein, 11 aa, Artificial Sequence
  Peptide Derived from Human Papillomavirus
CAFLKSNSQAK

SEQ ID NO: 34288 - protein, 10 aa, Artificial Sequence
  Peptide Derived from Human Papillomavirus
CAKNRITIEK

SEQ ID NO: 34289 - protein, 11 aa, Artificial Sequence
  Peptide Derived from Human Papillomavirus
CDKVSDEGDWR

SEQ ID NO: 34290 - protein, 8 aa, Artificial Sequence
  Peptide Derived from Human Papillomavirus
CGTMCRHY

SEQ ID NO: 34291 - protein, 9 aa, Artificial Sequence
  Peptide Derived from Human Papillomavirus
CGTMCRHYK

SEQ ID NO: 34292 - protein, 10 aa, Artificial Sequence
  Peptide Derived from Human Papillomavirus
CGTMCRHYKR

SEQ ID NO: 34293 - protein, 11 aa, Artificial Sequence
  Peptide Derived from Human Papillomavirus
CGTMCRHYKRA

SEQ ID NO: 34294 - protein, 9 aa, Artificial Sequence
  Peptide Derived from Human Papillomavirus
CIENNSKTA

SEQ ID NO: 34295 - protein, 10 aa, Artificial Sequence
  Peptide Derived from Human Papillomavirus
CIENNSKTAK

SEQ ID NO: 34296 - protein, 11 aa, Artificial Sequence
  Peptide Derived from Human Papillomavirus
CIENNSKTAKR

SEQ ID NO: 34297 - protein, 9 aa, Artificial Sequence
  Peptide Derived from Human Papillomavirus
CIISYANSK

SEQ ID NO: 34298 - protein, 11 aa, Artificial Sequence
  Peptide Derived from Human Papillomavirus
CIISYANSKSH

SEQ ID NO: 34299 - protein, 10 aa, Artificial Sequence
  Peptide Derived from Human Papillomavirus
CLYCHLQSLA

SEQ ID NO: 34300 - protein, 8 aa, Artificial Sequence
  Peptide Derived from Human Papillomavirus
CMLIQPPK

SEQ ID NO: 34301 - protein, 10 aa, Artificial Sequence
  Peptide Derived from Human Papillomavirus
CMLIQPPKLR

SEQ ID NO: 34302 - protein, 8 aa, Artificial Sequence
  Peptide Derived from Human Papillomavirus
CTDWCVAA

SEQ ID NO: 34303 - protein, 9 aa, Artificial Sequence
  Peptide Derived from Human Papillomavirus
CTDWCVAAF

SEQ ID NO: 34304 - protein, 9 aa, Artificial Sequence
  Peptide Derived from Human Papillomavirus
CVDYNISPR

SEQ ID NO: 34305 - protein, 11 aa, Artificial Sequence
  Peptide Derived from Human Papillomavirus
CVDYNISPRLK

SEQ ID NO: 34306 - protein, 8 aa, Artificial Sequence
  Peptide Derived from Human Papillomavirus
CVSGQNIR

SEQ ID NO: 34307 - protein, 10 aa, Artificial Sequence
  Peptide Derived from Human Papillomavirus
DAKIGMLDDA

SEQ ID NO: 34308 - protein, 8 aa, Artificial Sequence
  Peptide Derived from Human Papillomavirus
DATTPCWH

SEQ ID NO: 34309 - protein, 9 aa, Artificial Sequence
  Peptide Derived from Human Papillomavirus
DATTPCWHY

SEQ ID NO: 34310 - protein, 8 aa, Artificial Sequence
  Peptide Derived from Human Papillomavirus
DCGTMCRH

SEQ ID NO: 34311 - protein, 9 aa, Artificial Sequence
  Peptide Derived from Human Papillomavirus
DCGTMCRHY

SEQ ID NO: 34312 - protein, 10 aa, Artificial Sequence
  Peptide Derived from Human Papillomavirus
DCGTMCRHYK

SEQ ID NO: 34313 - protein, 11 aa, Artificial Sequence
  Peptide Derived from Human Papillomavirus
DCGTMCRHYKR

SEQ ID NO: 34314 - protein, 9 aa, Artificial Sequence
  Peptide Derived from Human Papillomavirus
DDATTPCWH

SEQ ID NO: 34315 - protein, 10 aa, Artificial Sequence
  Peptide Derived from Human Papillomavirus
DDATTPCWHY

SEQ ID NO: 34316 - protein, 8 aa, Artificial Sequence
  Peptide Derived from Human Papillomavirus
DDRWPYLH

SEQ ID NO: 34317 - protein, 10 aa, Artificial Sequence
  Peptide Derived from Human Papillomavirus
DDRWPYLHSR

SEQ ID NO: 34318 - protein, 8 aa, Artificial Sequence
  Peptide Derived from Human Papillomavirus
DDSEIAYK

SEQ ID NO: 34319 - protein, 9 aa, Artificial Sequence
  Peptide Derived from Human Papillomavirus
DDSEIAYKY

SEQ ID NO: 34320 - protein, 10 aa, Artificial Sequence
  Peptide Derived from Human Papillomavirus
DDSEIAYKYA

SEQ ID NO: 34321 - protein, 9 aa, Artificial Sequence
  Peptide Derived from Human Papillomavirus
DFIDNCNVY

SEQ ID NO: 34322 - protein, 8 aa, Artificial Sequence
  Peptide Derived from Human Papillomavirus
DGDSFSTF

SEQ ID NO: 34323 - protein, 9 aa, Artificial Sequence
  Peptide Derived from Human Papillomavirus
DGDSFSTFK

SEQ ID NO: 34324 - protein, 11 aa, Artificial Sequence
  Peptide Derived from Human Papillomavirus
DGEGTGCNGWF

SEQ ID NO: 34325 - protein, 10 aa, Artificial Sequence
  Peptide Derived from Human Papillomavirus
DGNPVSIDVK

SEQ ID NO: 34326 - protein, 11 aa, Artificial Sequence
  Peptide Derived from Human Papillomavirus
DGNPVSIDVKH

SEQ ID NO: 34327 - protein, 8 aa, Artificial Sequence
  Peptide Derived from Human Papillomavirus
DISSCVDY

SEQ ID NO: 34328 - protein, 8 aa, Artificial Sequence
  Peptide Derived from Human Papillomavirus
DIVKFLRY

SEQ ID NO: 34329 - protein, 9 aa, Artificial Sequence
  Peptide Derived from Human Papillomavirus
DLSQMVQWA

SEQ ID NO: 34330 - protein, 10 aa, Artificial Sequence
  Peptide Derived from Human Papillomavirus
DLSQMVQWAY

SEQ ID NO: 34331 - protein, 8 aa, Artificial Sequence
  Peptide Derived from Human Papillomavirus
DSDSNACA

SEQ ID NO: 34332 - protein, 9 aa, Artificial Sequence
  Peptide Derived from Human Papillomavirus
DSDSNACAF

SEQ ID NO: 34333 - protein, 11 aa, Artificial Sequence
  Peptide Derived from Human Papillomavirus
DSDSNACAFLK

SEQ ID NO: 34334 - protein, 8 aa, Artificial Sequence
  Peptide Derived from Human Papillomavirus
DSEIAYKY

SEQ ID NO: 34335 - protein, 9 aa, Artificial Sequence
  Peptide Derived from Human Papillomavirus
DSEIAYKYA

SEQ ID NO: 34336 - protein, 9 aa, Artificial Sequence
  Peptide Derived from Human Papillomavirus
DSNACAFLK

SEQ ID NO: 34337 - protein, 9 aa, Artificial Sequence
  Peptide Derived from Human Papillomavirus
DTGEDMVDF

SEQ ID NO: 34338 - protein, 11 aa, Artificial Sequence
  Peptide Derived from Human Papillomavirus
DVKHKALMQLK

SEQ ID NO: 34339 - protein, 9 aa, Artificial Sequence
  Peptide Derived from Human Papillomavirus
DVMDDSEIA

SEQ ID NO: 34340 - protein, 10 aa, Artificial Sequence
  Peptide Derived from Human Papillomavirus
DVMDDSEIAY

SEQ ID NO: 34341 - protein, 11 aa, Artificial Sequence
  Peptide Derived from Human Papillomavirus
DVMDDSEIAYK

SEQ ID NO: 34342 - protein, 8 aa, Artificial Sequence
  Peptide Derived from Human Papillomavirus
EAEEHAEA

SEQ ID NO: 34343 - protein, 9 aa, Artificial Sequence
  Peptide Derived from Human Papillomavirus
EAETAQALF

SEQ ID NO: 34344 - protein, 10 aa, Artificial Sequence
  Peptide Derived from Human Papillomavirus
EAETAQALFH

SEQ ID NO: 34345 - protein, 11 aa, Artificial Sequence
  Peptide Derived from Human Papillomavirus
EAETAQALFHA

SEQ ID NO: 34346 - protein, 8 aa, Artificial Sequence
  Peptide Derived from Human Papillomavirus
EAVQVLKR

SEQ ID NO: 34347 - protein, 9 aa, Artificial Sequence
  Peptide Derived from Human Papillomavirus
EAVQVLKRK

SEQ ID NO: 34348 - protein, 10 aa, Artificial Sequence
  Peptide Derived from Human Papillomavirus
EAVQVLKRKY

SEQ ID NO: 34349 - protein, 10 aa, Artificial Sequence
  Peptide Derived from Human Papillomavirus
EDKENDGDSF

SEQ ID NO: 34350 - protein, 8 aa, Artificial Sequence
  Peptide Derived from Human Papillomavirus
EFVSFLSA

SEQ ID NO: 34351 - protein, 10 aa, Artificial Sequence
  Peptide Derived from Human Papillomavirus
EFVSFLSALK

SEQ ID NO: 34352 - protein, 9 aa, Artificial Sequence
  Peptide Derived from Human Papillomavirus
EGDWRDIVK

SEQ ID NO: 34353 - protein, 10 aa, Artificial Sequence
  Peptide Derived from Human Papillomavirus
EGDWRDIVKF

SEQ ID NO: 34354 - protein, 10 aa, Artificial Sequence
  Peptide Derived from Human Papillomavirus
EGFKTLLQPY

SEQ ID NO: 34355 - protein, 9 aa, Artificial Sequence
  Peptide Derived from Human Papillomavirus
EGTGCNGWF

SEQ ID NO: 34356 - protein, 10 aa, Artificial Sequence
  Peptide Derived from Human Papillomavirus
EGTGCNGWFY

SEQ ID NO: 34357 - protein, 10 aa, Artificial Sequence
  Peptide Derived from Human Papillomavirus
EIAYKYAQLA

SEQ ID NO: 34358 - protein, 10 aa, Artificial Sequence
  Peptide Derived from Human Papillomavirus
ELIRPFQSNK

SEQ ID NO: 34359 - protein, 8 aa, Artificial Sequence
  Peptide Derived from Human Papillomavirus
ELSDKNWK

SEQ ID NO: 34360 - protein, 10 aa, Artificial Sequence
  Peptide Derived from Human Papillomavirus
ELSDKNWKSF

SEQ ID NO: 34361 - protein, 11 aa, Artificial Sequence
  Peptide Derived from Human Papillomavirus
ELSDKNWKSFF

SEQ ID NO: 34362 - protein, 8 aa, Artificial Sequence
  Peptide Derived from Human Papillomavirus
ETAQALFH

SEQ ID NO: 34363 - protein, 9 aa, Artificial Sequence
  Peptide Derived from Human Papillomavirus
ETAQALFHA

SEQ ID NO: 34364 - protein, 8 aa, Artificial Sequence
  Peptide Derived from Human Papillomavirus
ETPEWIER

SEQ ID NO: 34365 - protein, 9 aa, Artificial Sequence
  Peptide Derived from Human Papillomavirus
FDKNGNPVY

SEQ ID NO: 34366 - protein, 10 aa, Artificial Sequence
  Peptide Derived from Human Papillomavirus
FDLSQMVQWA

SEQ ID NO: 34367 - protein, 11 aa, Artificial Sequence
  Peptide Derived from Human Papillomavirus
FDLSQMVQWAY

SEQ ID NO: 34368 - protein, 8 aa, Artificial Sequence
  Peptide Derived from Human Papillomavirus
FFSRTWCR

SEQ ID NO: 34369 - protein, 8 aa, Artificial Sequence
  Peptide Derived from Human Papillomavirus
FGMSLISF

SEQ ID NO: 34370 - protein, 8 aa, Artificial Sequence
  Peptide Derived from Human Papillomavirus
FGVTGTVA

SEQ ID NO: 34371 - protein, 11 aa, Artificial Sequence
  Peptide Derived from Human Papillomavirus
FGVTGTVAEGF

SEQ ID NO: 34372 - protein, 8 aa, Artificial Sequence
  Peptide Derived from Human Papillomavirus
FIDNCNVY

SEQ ID NO: 34373 - protein, 8 aa, Artificial Sequence
  Peptide Derived from Human Papillomavirus
FLKGVPKK

SEQ ID NO: 34374 - protein, 8 aa, Artificial Sequence
  Peptide Derived from Human Papillomavirus
FLKSNSQA

SEQ ID NO: 34375 - protein, 9 aa, Artificial Sequence
  Peptide Derived from Human Papillomavirus
FLKSNSQAK

SEQ ID NO: 34376 - protein, 9 aa, Artificial Sequence
  Peptide Derived from Human Papillomavirus
FLQGCIISY

SEQ ID NO: 34377 - protein, 10 aa, Artificial Sequence
  Peptide Derived from Human Papillomavirus
FLQGCIISYA

SEQ ID NO: 34378 - protein, 9 aa, Artificial Sequence
  Peptide Derived from Human Papillomavirus
FLRYQQIEF

SEQ ID NO: 34379 - protein, 8 aa, Artificial Sequence
  Peptide Derived from Human Papillomavirus
FLSALKLF

SEQ ID NO: 34380 - protein, 10 aa, Artificial Sequence
  Peptide Derived from Human Papillomavirus
FLSALKLFLK

SEQ ID NO: 34381 - protein, 8 aa, Artificial Sequence
  Peptide Derived from Human Papillomavirus
FMELIRPF

SEQ ID NO: 34382 - protein, 11 aa, Artificial Sequence
  Peptide Derived from Human Papillomavirus
FSRTWCRLNLH

SEQ ID NO: 34383 - protein, 9 aa, Artificial Sequence
  Peptide Derived from Human Papillomavirus
FTFPNPFPF

SEQ ID NO: 34384 - protein, 11 aa, Artificial Sequence
  Peptide Derived from Human Papillomavirus
FTFPNPFPFDK

SEQ ID NO: 34385 - protein, 9 aa, Artificial Sequence
  Peptide Derived from Human Papillomavirus
FVSFLSALK

SEQ ID NO: 34386 - protein, 11 aa, Artificial Sequence
  Peptide Derived from Human Papillomavirus
FVSFLSALKLF

SEQ ID NO: 34387 - protein, 9 aa, Artificial Sequence
  Peptide Derived from Human Papillomavirus
GAPNTGKSY

SEQ ID NO: 34388 - protein, 10 aa, Artificial Sequence
  Peptide Derived from Human Papillomavirus
GAPNTGKSYF

SEQ ID NO: 34389 - protein, 10 aa, Artificial Sequence
  Peptide Derived from Human Papillomavirus
GCIISYANSK

SEQ ID NO: 34390 - protein, 10 aa, Artificial Sequence
  Peptide Derived from Human Papillomavirus
GCNGWFYVEA

SEQ ID NO: 34391 - protein, 8 aa, Artificial Sequence
  Peptide Derived from Human Papillomavirus
GDSFSTFK

SEQ ID NO: 34392 - protein, 8 aa, Artificial Sequence
  Peptide Derived from Human Papillomavirus
GDWRDIVK

SEQ ID NO: 34393 - protein, 9 aa, Artificial Sequence
  Peptide Derived from Human Papillomavirus
GDWRDIVKF

SEQ ID NO: 34394 - protein, 11 aa, Artificial Sequence
  Peptide Derived from Human Papillomavirus
GDWRDIVKFLR

SEQ ID NO: 34395 - protein, 9 aa, Artificial Sequence
  Peptide Derived from Human Papillomavirus
GFKTLLQPY

SEQ ID NO: 34396 - protein, 9 aa, Artificial Sequence
  Peptide Derived from Human Papillomavirus
GMSNISDVY

SEQ ID NO: 34397 - protein, 9 aa, Artificial Sequence
  Peptide Derived from Human Papillomavirus
GMVMLMLVR

SEQ ID NO: 34398 - protein, 10 aa, Artificial Sequence
  Peptide Derived from Human Papillomavirus
GMVMLMLVRF

SEQ ID NO: 34399 - protein, 11 aa, Artificial Sequence
  Peptide Derived from Human Papillomavirus
GMVMLMLVRFK

SEQ ID NO: 34400 - protein, 9 aa, Artificial Sequence
  Peptide Derived from Human Papillomavirus
GSDGTHSER

SEQ ID NO: 34401 - protein, 8 aa, Artificial Sequence
  Peptide Derived from Human Papillomavirus
GTGCNGWF

SEQ ID NO: 34402 - protein, 9 aa, Artificial Sequence
  Peptide Derived from Human Papillomavirus
GTGCNGWFY

SEQ ID NO: 34403 - protein, 8 aa, Artificial Sequence
  Peptide Derived from Human Papillomavirus
GTMCRHYK

SEQ ID NO: 34404 - protein, 9 aa, Artificial Sequence
  Peptide Derived from Human Papillomavirus
GTMCRHYKR

SEQ ID NO: 34405 - protein, 10 aa, Artificial Sequence
  Peptide Derived from Human Papillomavirus
GTMCRHYKRA

SEQ ID NO: 34406 - protein, 8 aa, Artificial Sequence
  Peptide Derived from Human Papillomavirus
GTVAEGFK

SEQ ID NO: 34407 - protein, 11 aa, Artificial Sequence
  Peptide Derived from Human Papillomavirus
GVPKKNCILIH

SEQ ID NO: 34408 - protein, 9 aa, Artificial Sequence
  Peptide Derived from Human Papillomavirus
GVSFMELIR

SEQ ID NO: 34409 - protein, 11 aa, Artificial Sequence
  Peptide Derived from Human Papillomavirus
GVSFMELIRPF

SEQ ID NO: 34410 - protein, 10 aa, Artificial Sequence
  Peptide Derived from Human Papillomavirus
GVTGTVAEGF

SEQ ID NO: 34411 - protein, 11 aa, Artificial Sequence
  Peptide Derived from Human Papillomavirus
GVTGTVAEGFK

SEQ ID NO: 34412 - protein, 9 aa, Artificial Sequence
  Peptide Derived from Human Papillomavirus
HAEAVQVLK

SEQ ID NO: 34413 - protein, 10 aa, Artificial Sequence
  Peptide Derived from Human Papillomavirus
HAEAVQVLKR

SEQ ID NO: 34414 - protein, 11 aa, Artificial Sequence
  Peptide Derived from Human Papillomavirus
HAEAVQVLKRK

SEQ ID NO: 34415 - protein, 8 aa, Artificial Sequence
  Peptide Derived from Human Papillomavirus
HAQEAEEH

SEQ ID NO: 34416 - protein, 9 aa, Artificial Sequence
  Peptide Derived from Human Papillomavirus
HAQEAEEHA

SEQ ID NO: 34417 - protein, 11 aa, Artificial Sequence
  Peptide Derived from Human Papillomavirus
HAQEAEEHAEA

SEQ ID NO: 34418 - protein, 8 aa, Artificial Sequence
  Peptide Derived from Human Papillomavirus
HFWLQPLA

SEQ ID NO: 34419 - protein, 10 aa, Artificial Sequence
  Peptide Derived from Human Papillomavirus
HFWLQPLADA

SEQ ID NO: 34420 - protein, 11 aa, Artificial Sequence
  Peptide Derived from Human Papillomavirus
HFWLQPLADAK

SEQ ID NO: 34421 - protein, 8 aa, Artificial Sequence
  Peptide Derived from Human Papillomavirus
HGAPNTGK

SEQ ID NO: 34422 - protein, 10 aa, Artificial Sequence
  Peptide Derived from Human Papillomavirus
HGAPNTGKSY

SEQ ID NO: 34423 - protein, 11 aa, Artificial Sequence
  Peptide Derived from Human Papillomavirus
HGAPNTGKSYF

SEQ ID NO: 34424 - protein, 11 aa, Artificial Sequence
  Peptide Derived from Human Papillomavirus
HSERENETPTR

SEQ ID NO: 34425 - protein, 8 aa, Artificial Sequence
  Peptide Derived from Human Papillomavirus
HSFNDTTF

SEQ ID NO: 34426 - protein, 9 aa, Artificial Sequence
  Peptide Derived from Human Papillomavirus
HSRLVVFTF

SEQ ID NO: 34427 - protein, 9 aa, Artificial Sequence
  Peptide Derived from Human Papillomavirus
IAYKYAQLA

SEQ ID NO: 34428 - protein, 8 aa, Artificial Sequence
  Peptide Derived from Human Papillomavirus
ICIENNSK

SEQ ID NO: 34429 - protein, 10 aa, Artificial Sequence
  Peptide Derived from Human Papillomavirus
ICIENNSKTA

SEQ ID NO: 34430 - protein, 11 aa, Artificial Sequence
  Peptide Derived from Human Papillomavirus
ICIENNSKTAK

SEQ ID NO: 34431 - protein, 11 aa, Artificial Sequence
  Peptide Derived from Human Papillomavirus
IDNCNVYNNQA

SEQ ID NO: 34432 - protein, 8 aa, Artificial Sequence
  Peptide Derived from Human Papillomavirus
IDNYLRNA

SEQ ID NO: 34433 - protein, 8 aa, Artificial Sequence
  Peptide Derived from Human Papillomavirus
IISYANSK

SEQ ID NO: 34434 - protein, 10 aa, Artificial Sequence
  Peptide Derived from Human Papillomavirus
IISYANSKSH

SEQ ID NO: 34435 - protein, 11 aa, Artificial Sequence
  Peptide Derived from Human Papillomavirus
IISYANSKSHF

SEQ ID NO: 34436 - protein, 11 aa, Artificial Sequence
  Peptide Derived from Human Papillomavirus
ILIHGAPNTGK

SEQ ID NO: 34437 - protein, 11 aa, Artificial Sequence
  Peptide Derived from Human Papillomavirus
ILQVLKTSNGK

SEQ ID NO: 34438 - protein, 11 aa, Artificial Sequence
  Peptide Derived from Human Papillomavirus
ISFLQGCIISY

SEQ ID NO: 34439 - protein, 9 aa, Artificial Sequence
  Peptide Derived from Human Papillomavirus
ISYANSKSH

SEQ ID NO: 34440 - protein, 10 aa, Artificial Sequence
  Peptide Derived from Human Papillomavirus
ISYANSKSHF

SEQ ID NO: 34441 - protein, 9 aa, Artificial Sequence
  Peptide Derived from Human Papillomavirus
ITIEKLLEK

SEQ ID NO: 34442 - protein, 9 aa, Artificial Sequence
  Peptide Derived from Human Papillomavirus
ITSNINAGK

SEQ ID NO: 34443 - protein, 10 aa, Artificial Sequence
  Peptide Derived from Human Papillomavirus
IVKDCGTMCR

SEQ ID NO: 34444 - protein, 11 aa, Artificial Sequence
  Peptide Derived from Human Papillomavirus
IVKDCGTMCRH

SEQ ID NO: 34445 - protein, 8 aa, Artificial Sequence
  Peptide Derived from Human Papillomavirus
KAAMLGKF

SEQ ID NO: 34446 - protein, 9 aa, Artificial Sequence
  Peptide Derived from Human Papillomavirus
KAAMLGKFK

SEQ ID NO: 34447 - protein, 10 aa, Artificial Sequence
  Peptide Derived from Human Papillomavirus
KAICIENNSK

SEQ ID NO: 34448 - protein, 11 aa, Artificial Sequence
  Peptide Derived from Human Papillomavirus
KCAKNRITIEK

SEQ ID NO: 34449 - protein, 9 aa, Artificial Sequence
  Peptide Derived from Human Papillomavirus
KCVSGQNIR

SEQ ID NO: 34450 - protein, 8 aa, Artificial Sequence
  Peptide Derived from Human Papillomavirus
KDCGTMCR

SEQ ID NO: 34451 - protein, 9 aa, Artificial Sequence
  Peptide Derived from Human Papillomavirus
KDCGTMCRH

SEQ ID NO: 34452 - protein, 10 aa, Artificial Sequence
  Peptide Derived from Human Papillomavirus
KDCGTMCRHY

SEQ ID NO: 34453 - protein, 11 aa, Artificial Sequence
  Peptide Derived from Human Papillomavirus
KDCGTMCRHYK

SEQ ID NO: 34454 - protein, 9 aa, Artificial Sequence
  Peptide Derived from Human Papillomavirus
KDDRWPYLH

SEQ ID NO: 34455 - protein, 11 aa, Artificial Sequence
  Peptide Derived from Human Papillomavirus
KDDRWPYLHSR

SEQ ID NO: 34456 - protein, 10 aa, Artificial Sequence
  Peptide Derived from Human Papillomavirus
KFKELYGVSF

SEQ ID NO: 34457 - protein, 10 aa, Artificial Sequence
  Peptide Derived from Human Papillomavirus
KFLRYQQIEF

SEQ ID NO: 34458 - protein, 8 aa, Artificial Sequence
  Peptide Derived from Human Papillomavirus
KIGMLDDA

SEQ ID NO: 34459 - protein, 11 aa, Artificial Sequence
  Peptide Derived from Human Papillomavirus
KIVKDCGTMCR

SEQ ID NO: 34460 - protein, 9 aa, Artificial Sequence
  Peptide Derived from Human Papillomavirus
KLFLKGVPK

SEQ ID NO: 34461 - protein, 10 aa, Artificial Sequence
  Peptide Derived from Human Papillomavirus
KLFLKGVPKK

SEQ ID NO: 34462 - protein, 8 aa, Artificial Sequence
  Peptide Derived from Human Papillomavirus
KLRSTAAA

SEQ ID NO: 34463 - protein, 10 aa, Artificial Sequence
  Peptide Derived from Human Papillomavirus
KLRSTAAALY

SEQ ID NO: 34464 - protein, 10 aa, Artificial Sequence
  Peptide Derived from Human Papillomavirus
KSFFSRTWCR

SEQ ID NO: 34465 - protein, 10 aa, Artificial Sequence
  Peptide Derived from Human Papillomavirus
KSHFWLQPLA

SEQ ID NO: 34466 - protein, 10 aa, Artificial Sequence
  Peptide Derived from Human Papillomavirus
KSNSQAKIVK

SEQ ID NO: 34467 - protein, 10 aa, Artificial Sequence
  Peptide Derived from Human Papillomavirus
KSTCTDWCVA

SEQ ID NO: 34468 - protein, 11 aa, Artificial Sequence
  Peptide Derived from Human Papillomavirus
KSTCTDWCVAA

SEQ ID NO: 34469 - protein, 11 aa, Artificial Sequence
  Peptide Derived from Human Papillomavirus
KSYFGMSLISF

SEQ ID NO: 34470 - protein, 8 aa, Artificial Sequence
  Peptide Derived from Human Papillomavirus
KTAKRRLF

SEQ ID NO: 34471 - protein, 10 aa, Artificial Sequence
  Peptide Derived from Human Papillomavirus
KTLLQPYCLY

SEQ ID NO: 34472 - protein, 8 aa, Artificial Sequence
  Peptide Derived from Human Papillomavirus
KTSNGKAA

SEQ ID NO: 34473 - protein, 9 aa, Artificial Sequence
  Peptide Derived from Human Papillomavirus
KVSDEGDWR

SEQ ID NO: 34474 - protein, 8 aa, Artificial Sequence
  Peptide Derived from Human Papillomavirus
LADSDSNA

SEQ ID NO: 34475 - protein, 10 aa, Artificial Sequence
  Peptide Derived from Human Papillomavirus
LADSDSNACA

SEQ ID NO: 34476 - protein, 11 aa, Artificial Sequence
  Peptide Derived from Human Papillomavirus
LADSDSNACAF

SEQ ID NO: 34477 - protein, 10 aa, Artificial Sequence
  Peptide Derived from Human Papillomavirus
LDDATTPCWH

SEQ ID NO: 34478 - protein, 11 aa, Artificial Sequence
  Peptide Derived from Human Papillomavirus
LDDATTPCWHY

SEQ ID NO: 34479 - protein, 11 aa, Artificial Sequence
  Peptide Derived from Human Papillomavirus
LDGNPVSIDVK

SEQ ID NO: 34480 - protein, 9 aa, Artificial Sequence
  Peptide Derived from Human Papillomavirus
LFELPDSGY

SEQ ID NO: 34481 - protein, 10 aa, Artificial Sequence
  Peptide Derived from Human Papillomavirus
LFHAQEAEEH

SEQ ID NO: 34482 - protein, 11 aa, Artificial Sequence
  Peptide Derived from Human Papillomavirus
LFHAQEAEEHA

SEQ ID NO: 34483 - protein, 8 aa, Artificial Sequence
  Peptide Derived from Human Papillomavirus
LFLKGVPK

SEQ ID NO: 34484 - protein, 9 aa, Artificial Sequence
  Peptide Derived from Human Papillomavirus
LFLKGVPKK

SEQ ID NO: 34485 - protein, 8 aa, Artificial Sequence
  Peptide Derived from Human Papillomavirus
LGKFKELY

SEQ ID NO: 34486 - protein, 10 aa, Artificial Sequence
  Peptide Derived from Human Papillomavirus
LIHGAPNTGK

SEQ ID NO: 34487 - protein, 8 aa, Artificial Sequence
  Peptide Derived from Human Papillomavirus
LIQPPKLR

SEQ ID NO: 34488 - protein, 11 aa, Artificial Sequence
  Peptide Derived from Human Papillomavirus
LIQPPKLRSTA

SEQ ID NO: 34489 - protein, 9 aa, Artificial Sequence
  Peptide Derived from Human Papillomavirus
LIRPFQSNK

SEQ ID NO: 34490 - protein, 8 aa, Artificial Sequence
  Peptide Derived from Human Papillomavirus
LITSNINA

SEQ ID NO: 34491 - protein, 10 aa, Artificial Sequence
  Peptide Derived from Human Papillomavirus
LITSNINAGK

SEQ ID NO: 34492 - protein, 9 aa, Artificial Sequence
  Peptide Derived from Human Papillomavirus
LLITSNINA

SEQ ID NO: 34493 - protein, 11 aa, Artificial Sequence
  Peptide Derived from Human Papillomavirus
LLITSNINAGK

SEQ ID NO: 34494 - protein, 8 aa, Artificial Sequence
  Peptide Derived from Human Papillomavirus
LLQPYCLY

SEQ ID NO: 34495 - protein, 10 aa, Artificial Sequence
  Peptide Derived from Human Papillomavirus
LLQPYCLYCH

SEQ ID NO: 34496 - protein, 9 aa, Artificial Sequence
  Peptide Derived from Human Papillomavirus
LMLVRFKCA

SEQ ID NO: 34497 - protein, 10 aa, Artificial Sequence
  Peptide Derived from Human Papillomavirus
LMLVRFKCAK

SEQ ID NO: 34498 - protein, 9 aa, Artificial Sequence
  Peptide Derived from Human Papillomavirus
LSALKLFLK

SEQ ID NO: 34499 - protein, 10 aa, Artificial Sequence
  Peptide Derived from Human Papillomavirus
LSCNGSDGTH

SEQ ID NO: 34500 - protein, 10 aa, Artificial Sequence
  Peptide Derived from Human Papillomavirus
LSDISSCVDY

SEQ ID NO: 34501 - protein, 9 aa, Artificial Sequence
  Peptide Derived from Human Papillomavirus
LSDKNWKSF

SEQ ID NO: 34502 - protein, 10 aa, Artificial Sequence
  Peptide Derived from Human Papillomavirus
LSDKNWKSFF

SEQ ID NO: 34503 - protein, 8 aa, Artificial Sequence
  Peptide Derived from Human Papillomavirus
LSQMVQWA

SEQ ID NO: 34504 - protein, 9 aa, Artificial Sequence
  Peptide Derived from Human Papillomavirus
LSQMVQWAY

SEQ ID NO: 34505 - protein, 8 aa, Artificial Sequence
  Peptide Derived from Human Papillomavirus
LVRFKCAK

SEQ ID NO: 34506 - protein, 10 aa, Artificial Sequence
  Peptide Derived from Human Papillomavirus
LVRFKCAKNR

SEQ ID NO: 34507 - protein, 10 aa, Artificial Sequence
  Peptide Derived from Human Papillomavirus
LVVFTFPNPF

SEQ ID NO: 34508 - protein, 8 aa, Artificial Sequence
  Peptide Derived from Human Papillomavirus
MCRHYKRA

SEQ ID NO: 34509 - protein, 10 aa, Artificial Sequence
  Peptide Derived from Human Papillomavirus
MCRHYKRAEK

SEQ ID NO: 34510 - protein, 11 aa, Artificial Sequence
  Peptide Derived from Human Papillomavirus
MCRHYKRAEKR

SEQ ID NO: 34511 - protein, 8 aa, Artificial Sequence
  Peptide Derived from Human Papillomavirus
MDDSEIAY

SEQ ID NO: 34512 - protein, 9 aa, Artificial Sequence
  Peptide Derived from Human Papillomavirus
MDDSEIAYK

SEQ ID NO: 34513 - protein, 10 aa, Artificial Sequence
  Peptide Derived from Human Papillomavirus
MDDSEIAYKY

SEQ ID NO: 34514 - protein, 11 aa, Artificial Sequence
  Peptide Derived from Human Papillomavirus
MDDSEIAYKYA

SEQ ID NO: 34515 - protein, 8 aa, Artificial Sequence
  Peptide Derived from Human Papillomavirus
MGQWIKSR

SEQ ID NO: 34516 - protein, 11 aa, Artificial Sequence
  Peptide Derived from Human Papillomavirus
MGQWIKSRCDK

SEQ ID NO: 34517 - protein, 11 aa, Artificial Sequence
  Peptide Derived from Human Papillomavirus
MLDDATTPCWH

SEQ ID NO: 34518 - protein, 9 aa, Artificial Sequence
  Peptide Derived from Human Papillomavirus
MLGKFKELY

SEQ ID NO: 34519 - protein, 9 aa, Artificial Sequence
  Peptide Derived from Human Papillomavirus
MLIQPPKLR

SEQ ID NO: 34520 - protein, 8 aa, Artificial Sequence
  Peptide Derived from Human Papillomavirus
MLMLVRFK

SEQ ID NO: 34521 - protein, 10 aa, Artificial Sequence
  Peptide Derived from Human Papillomavirus
MLMLVRFKCA

SEQ ID NO: 34522 - protein, 11 aa, Artificial Sequence
  Peptide Derived from Human Papillomavirus
MLMLVRFKCAK

SEQ ID NO: 34523 - protein, 8 aa, Artificial Sequence
  Peptide Derived from Human Papillomavirus
MLVRFKCA

SEQ ID NO: 34524 - protein, 9 aa, Artificial Sequence
  Peptide Derived from Human Papillomavirus
MLVRFKCAK

SEQ ID NO: 34525 - protein, 11 aa, Artificial Sequence
  Peptide Derived from Human Papillomavirus
MLVRFKCAKNR

SEQ ID NO: 34526 - protein, 8 aa, Artificial Sequence
  Peptide Derived from Human Papillomavirus
MSMGQWIK

SEQ ID NO: 34527 - protein, 10 aa, Artificial Sequence
  Peptide Derived from Human Papillomavirus
MSMGQWIKSR

SEQ ID NO: 34528 - protein, 8 aa, Artificial Sequence
  Peptide Derived from Human Papillomavirus
MSNISDVY

SEQ ID NO: 34529 - protein, 11 aa, Artificial Sequence
  Peptide Derived from Human Papillomavirus
MVDFIDNCNVY

SEQ ID NO: 34530 - protein, 8 aa, Artificial Sequence
  Peptide Derived from Human Papillomavirus
MVMLMLVR

SEQ ID NO: 34531 - protein, 9 aa, Artificial Sequence
  Peptide Derived from Human Papillomavirus
MVMLMLVRF

SEQ ID NO: 34532 - protein, 10 aa, Artificial Sequence
  Peptide Derived from Human Papillomavirus
MVMLMLVRFK

SEQ ID NO: 34533 - protein, 10 aa, Artificial Sequence
  Peptide Derived from Human Papillomavirus
NAGKDDRWPY

SEQ ID NO: 34534 - protein, 8 aa, Artificial Sequence
  Peptide Derived from Human Papillomavirus
NCILIHGA

SEQ ID NO: 34535 - protein, 9 aa, Artificial Sequence
  Peptide Derived from Human Papillomavirus
NCMLIQPPK

SEQ ID NO: 34536 - protein, 11 aa, Artificial Sequence
  Peptide Derived from Human Papillomavirus
NCMLIQPPKLR

SEQ ID NO: 34537 - protein, 9 aa, Artificial Sequence
  Peptide Derived from Human Papillomavirus
NCNVYNNQA

SEQ ID NO: 34538 - protein, 11 aa, Artificial Sequence
  Peptide Derived from Human Papillomavirus
NCNVYNNQAEA

SEQ ID NO: 34539 - protein, 9 aa, Artificial Sequence
  Peptide Derived from Human Papillomavirus
NDGDSFSTF

SEQ ID NO: 34540 - protein, 10 aa, Artificial Sequence
  Peptide Derived from Human Papillomavirus
NDGDSFSTFK

SEQ ID NO: 34541 - protein, 10 aa, Artificial Sequence
  Peptide Derived from Human Papillomavirus
NDVMDDSEIA

SEQ ID NO: 34542 - protein, 11 aa, Artificial Sequence
  Peptide Derived from Human Papillomavirus
NDVMDDSEIAY

SEQ ID NO: 34543 - protein, 9 aa, Artificial Sequence
  Peptide Derived from Human Papillomavirus
NGKAAMLGK

SEQ ID NO: 34544 - protein, 10 aa, Artificial Sequence
  Peptide Derived from Human Papillomavirus
NGKAAMLGKF

SEQ ID NO: 34545 - protein, 11 aa, Artificial Sequence
  Peptide Derived from Human Papillomavirus
NGKAAMLGKFK

SEQ ID NO: 34546 - protein, 11 aa, Artificial Sequence
  Peptide Derived from Human Papillomavirus
NGNPVYELSDK

SEQ ID NO: 34547 - protein, 10 aa, Artificial Sequence
  Peptide Derived from Human Papillomavirus
NGSDGTHSER

SEQ ID NO: 34548 - protein, 8 aa, Artificial Sequence
  Peptide Derived from Human Papillomavirus
NGWFYVEA

SEQ ID NO: 34549 - protein, 9 aa, Artificial Sequence
  Peptide Derived from Human Papillomavirus
NINAGKDDR

SEQ ID NO: 34550 - protein, 8 aa, Artificial Sequence
  Peptide Derived from Human Papillomavirus
NISPRLKA

SEQ ID NO: 34551 - protein, 8 aa, Artificial Sequence
  Peptide Derived from Human Papillomavirus
NLHEEEDK

SEQ ID NO: 34552 - protein, 8 aa, Artificial Sequence
  Peptide Derived from Human Papillomavirus
NSKTAKRR

SEQ ID NO: 34553 - protein, 10 aa, Artificial Sequence
  Peptide Derived from Human Papillomavirus
NSKTAKRRLF

SEQ ID NO: 34554 - protein, 8 aa, Artificial Sequence
  Peptide Derived from Human Papillomavirus
NSQAKIVK

SEQ ID NO: 34555 - protein, 9 aa, Artificial Sequence
  Peptide Derived from Human Papillomavirus
NVYNNQAEA

SEQ ID NO: 34556 - protein, 9 aa, Artificial Sequence
  Peptide Derived from Human Papillomavirus
PCWHYIDNY

SEQ ID NO: 34557 - protein, 11 aa, Artificial Sequence
  Peptide Derived from Human Papillomavirus
PCWHYIDNYLR

SEQ ID NO: 34558 - protein, 10 aa, Artificial Sequence
  Peptide Derived from Human Papillomavirus
PFDKNGNPVY

SEQ ID NO: 34559 - protein, 10 aa, Artificial Sequence
  Peptide Derived from Human Papillomavirus
PLLITSNINA

SEQ ID NO: 34560 - protein, 11 aa, Artificial Sequence
  Peptide Derived from Human Papillomavirus
PLSDISSCVDY

SEQ ID NO: 34561 - protein, 10 aa, Artificial Sequence
  Peptide Derived from Human Papillomavirus
PTRNILQVLK

SEQ ID NO: 34562 - protein, 8 aa, Artificial Sequence
  Peptide Derived from Human Papillomavirus
PVSIDVKH

SEQ ID NO: 34563 - protein, 9 aa, Artificial Sequence
  Peptide Derived from Human Papillomavirus
PVSIDVKHK

SEQ ID NO: 34564 - protein, 10 aa, Artificial Sequence
  Peptide Derived from Human Papillomavirus
PVSIDVKHKA

SEQ ID NO: 34565 - protein, 8 aa, Artificial Sequence
  Peptide Derived from Human Papillomavirus
PVYELSDK

SEQ ID NO: 34566 - protein, 11 aa, Artificial Sequence
  Peptide Derived from Human Papillomavirus
PVYELSDKNWK

SEQ ID NO: 34567 - protein, 9 aa, Artificial Sequence
  Peptide Derived from Human Papillomavirus
QAEAETAQA

SEQ ID NO: 34568 - protein, 11 aa, Artificial Sequence
  Peptide Derived from Human Papillomavirus
QAEAETAQALF

SEQ ID NO: 34569 - protein, 9 aa, Artificial Sequence
  Peptide Derived from Human Papillomavirus
QALFHAQEA

SEQ ID NO: 34570 - protein, 8 aa, Artificial Sequence
  Peptide Derived from Human Papillomavirus
QGCIISYA

SEQ ID NO: 34571 - protein, 11 aa, Artificial Sequence
  Peptide Derived from Human Papillomavirus
QGCIISYANSK

SEQ ID NO: 34572 - protein, 10 aa, Artificial Sequence
  Peptide Derived from Human Papillomavirus
QIEFVSFLSA

SEQ ID NO: 34573 - protein, 9 aa, Artificial Sequence
  Peptide Derived from Human Papillomavirus
QLADSDSNA

SEQ ID NO: 34574 - protein, 11 aa, Artificial Sequence
  Peptide Derived from Human Papillomavirus
QLADSDSNACA

SEQ ID NO: 34575 - protein, 9 aa, Artificial Sequence
  Peptide Derived from Human Papillomavirus
QMSMGQWIK

SEQ ID NO: 34576 - protein, 11 aa, Artificial Sequence
  Peptide Derived from Human Papillomavirus
QMSMGQWIKSR

SEQ ID NO: 34577 - protein, 8 aa, Artificial Sequence
  Peptide Derived from Human Papillomavirus
QTVLQHSF

SEQ ID NO: 34578 - protein, 9 aa, Artificial Sequence
  Peptide Derived from Human Papillomavirus
QVLKTSNGK

SEQ ID NO: 34579 - protein, 10 aa, Artificial Sequence
  Peptide Derived from Human Papillomavirus
QVLKTSNGKA

SEQ ID NO: 34580 - protein, 11 aa, Artificial Sequence
  Peptide Derived from Human Papillomavirus
QVLKTSNGKAA

SEQ ID NO: 34581 - protein, 8 aa, Artificial Sequence
  Peptide Derived from Human Papillomavirus
RDIVKFLR

SEQ ID NO: 34582 - protein, 9 aa, Artificial Sequence
  Peptide Derived from Human Papillomavirus
RDIVKFLRY

SEQ ID NO: 34583 - protein, 8 aa, Artificial Sequence
  Peptide Derived from Human Papillomavirus
RFKCAKNR

SEQ ID NO: 34584 - protein, 10 aa, Artificial Sequence
  Peptide Derived from Human Papillomavirus
RITIEKLLEK

SEQ ID NO: 34585 - protein, 10 aa, Artificial Sequence
  Peptide Derived from Human Papillomavirus
RLFELPDSGY

SEQ ID NO: 34586 - protein, 10 aa, Artificial Sequence
  Peptide Derived from Human Papillomavirus
RLNLHEEEDK

SEQ ID NO: 34587 - protein, 11 aa, Artificial Sequence
  Peptide Derived from Human Papillomavirus
RLVVFTFPNPF

SEQ ID NO: 34588 - protein, 8 aa, Artificial Sequence
  Peptide Derived from Human Papillomavirus
RSTAAALY

SEQ ID NO: 34589 - protein, 10 aa, Artificial Sequence
  Peptide Derived from Human Papillomavirus
RSTAAALYWY

SEQ ID NO: 34590 - protein, 11 aa, Artificial Sequence
  Peptide Derived from Human Papillomavirus
RSTAAALYWYR

SEQ ID NO: 34591 - protein, 11 aa, Artificial Sequence
  Peptide Derived from Human Papillomavirus
RTGMSNISDVY

SEQ ID NO: 34592 - protein, 9 aa, Artificial Sequence
  Peptide Derived from Human Papillomavirus
RTWCRLNLH

SEQ ID NO: 34593 - protein, 8 aa, Artificial Sequence
  Peptide Derived from Human Papillomavirus
SALKLFLK

SEQ ID NO: 34594 - protein, 9 aa, Artificial Sequence
  Peptide Derived from Human Papillomavirus
SCNGSDGTH

SEQ ID NO: 34595 - protein, 10 aa, Artificial Sequence
  Peptide Derived from Human Papillomavirus
SCVDYNISPR

SEQ ID NO: 34596 - protein, 11 aa, Artificial Sequence
  Peptide Derived from Human Papillomavirus
SDEGDWRDIVK

SEQ ID NO: 34597 - protein, 8 aa, Artificial Sequence
  Peptide Derived from Human Papillomavirus
SDGTHSER

SEQ ID NO: 34598 - protein, 9 aa, Artificial Sequence
  Peptide Derived from Human Papillomavirus
SDISSCVDY

SEQ ID NO: 34599 - protein, 8 aa, Artificial Sequence
  Peptide Derived from Human Papillomavirus
SDKNWKSF

SEQ ID NO: 34600 - protein, 9 aa, Artificial Sequence
  Peptide Derived from Human Papillomavirus
SDKNWKSFF

SEQ ID NO: 34601 - protein, 11 aa, Artificial Sequence
  Peptide Derived from Human Papillomavirus
SDKNWKSFFSR

SEQ ID NO: 34602 - protein, 8 aa, Artificial Sequence
  Peptide Derived from Human Papillomavirus
SDSNACAF

SEQ ID NO: 34603 - protein, 10 aa, Artificial Sequence
  Peptide Derived from Human Papillomavirus
SDSNACAFLK

SEQ ID NO: 34604 - protein, 10 aa, Artificial Sequence
  Peptide Derived from Human Papillomavirus
SDTGEDMVDF

SEQ ID NO: 34605 - protein, 9 aa, Artificial Sequence
  Peptide Derived from Human Papillomavirus
SFFSRTWCR

SEQ ID NO: 34606 - protein, 10 aa, Artificial Sequence
  Peptide Derived from Human Papillomavirus
SFLQGCIISY

SEQ ID NO: 34607 - protein, 11 aa, Artificial Sequence
  Peptide Derived from Human Papillomavirus
SFLQGCIISYA

SEQ ID NO: 34608 - protein, 9 aa, Artificial Sequence
  Peptide Derived from Human Papillomavirus
SFLSALKLF

SEQ ID NO: 34609 - protein, 11 aa, Artificial Sequence
  Peptide Derived from Human Papillomavirus
SFLSALKLFLK

SEQ ID NO: 34610 - protein, 9 aa, Artificial Sequence
  Peptide Derived from Human Papillomavirus
SFMELIRPF

SEQ ID NO: 34611 - protein, 8 aa, Artificial Sequence
  Peptide Derived from Human Papillomavirus
SIDVKHKA

SEQ ID NO: 34612 - protein, 9 aa, Artificial Sequence
  Peptide Derived from Human Papillomavirus
SMGQWIKSR

SEQ ID NO: 34613 - protein, 11 aa, Artificial Sequence
  Peptide Derived from Human Papillomavirus
SSCVDYNISPR

SEQ ID NO: 34614 - protein, 11 aa, Artificial Sequence
  Peptide Derived from Human Papillomavirus
SSDTGEDMVDF

SEQ ID NO: 34615 - protein, 9 aa, Artificial Sequence
  Peptide Derived from Human Papillomavirus
STAAALYWY

SEQ ID NO: 34616 - protein, 10 aa, Artificial Sequence
  Peptide Derived from Human Papillomavirus
STAAALYWYR

SEQ ID NO: 34617 - protein, 9 aa, Artificial Sequence
  Peptide Derived from Human Papillomavirus
STCTDWCVA

SEQ ID NO: 34618 - protein, 10 aa, Artificial Sequence
  Peptide Derived from Human Papillomavirus
STCTDWCVAA

SEQ ID NO: 34619 - protein, 11 aa, Artificial Sequence
  Peptide Derived from Human Papillomavirus
STCTDWCVAAF

SEQ ID NO: 34620 - protein, 11 aa, Artificial Sequence
  Peptide Derived from Human Papillomavirus
STNCMLIQPPK

SEQ ID NO: 34621 - protein, 8 aa, Artificial Sequence
  Peptide Derived from Human Papillomavirus
TAAALYWY

SEQ ID NO: 34622 - protein, 9 aa, Artificial Sequence
  Peptide Derived from Human Papillomavirus
TAAALYWYR

SEQ ID NO: 34623 - protein, 8 aa, Artificial Sequence
  Peptide Derived from Human Papillomavirus
TAQALFHA

SEQ ID NO: 34624 - protein, 11 aa, Artificial Sequence
  Peptide Derived from Human Papillomavirus
TAQALFHAQEA

SEQ ID NO: 34625 - protein, 8 aa, Artificial Sequence
  Peptide Derived from Human Papillomavirus
TCTDWCVA

SEQ ID NO: 34626 - protein, 9 aa, Artificial Sequence
  Peptide Derived from Human Papillomavirus
TCTDWCVAA

SEQ ID NO: 34627 - protein, 10 aa, Artificial Sequence
  Peptide Derived from Human Papillomavirus
TCTDWCVAAF

SEQ ID NO: 34628 - protein, 8 aa, Artificial Sequence
  Peptide Derived from Human Papillomavirus
TDWCVAAF

SEQ ID NO: 34629 - protein, 11 aa, Artificial Sequence
  Peptide Derived from Human Papillomavirus
TFDLSQMVQWA

SEQ ID NO: 34630 - protein, 11 aa, Artificial Sequence
  Peptide Derived from Human Papillomavirus
TFKCVSGQNIR

SEQ ID NO: 34631 - protein, 8 aa, Artificial Sequence
  Peptide Derived from Human Papillomavirus
TFPNPFPF

SEQ ID NO: 34632 - protein, 10 aa, Artificial Sequence
  Peptide Derived from Human Papillomavirus
TFPNPFPFDK

SEQ ID NO: 34633 - protein, 8 aa, Artificial Sequence
  Peptide Derived from Human Papillomavirus
TGCNGWFY

SEQ ID NO: 34634 - protein, 11 aa, Artificial Sequence
  Peptide Derived from Human Papillomavirus
TGCNGWFYVEA

SEQ ID NO: 34635 - protein, 8 aa, Artificial Sequence
  Peptide Derived from Human Papillomavirus
TGEDMVDF

SEQ ID NO: 34636 - protein, 10 aa, Artificial Sequence
  Peptide Derived from Human Papillomavirus
TGMSNISDVY

SEQ ID NO: 34637 - protein, 8 aa, Artificial Sequence
  Peptide Derived from Human Papillomavirus
TGTVAEGF

SEQ ID NO: 34638 - protein, 9 aa, Artificial Sequence
  Peptide Derived from Human Papillomavirus
TGTVAEGFK

SEQ ID NO: 34639 - protein, 8 aa, Artificial Sequence
  Peptide Derived from Human Papillomavirus
TIEKLLEK

SEQ ID NO: 34640 - protein, 9 aa, Artificial Sequence
  Peptide Derived from Human Papillomavirus
TLLQPYCLY

SEQ ID NO: 34641 - protein, 11 aa, Artificial Sequence
  Peptide Derived from Human Papillomavirus
TLLQPYCLYCH

SEQ ID NO: 34642 - protein, 11 aa, Artificial Sequence
  Peptide Derived from Human Papillomavirus
TLSCNGSDGTH

SEQ ID NO: 34643 - protein, 8 aa, Artificial Sequence
  Peptide Derived from Human Papillomavirus
TMCRHYKR

SEQ ID NO: 34644 - protein, 9 aa, Artificial Sequence
  Peptide Derived from Human Papillomavirus
TMCRHYKRA

SEQ ID NO: 34645 - protein, 11 aa, Artificial Sequence
  Peptide Derived from Human Papillomavirus
TMCRHYKRAEK

SEQ ID NO: 34646 - protein, 11 aa, Artificial Sequence
  Peptide Derived from Human Papillomavirus
TSNGKAAMLGK

SEQ ID NO: 34647 - protein, 8 aa, Artificial Sequence
  Peptide Derived from Human Papillomavirus
TSNINAGK

SEQ ID NO: 34648 - protein, 11 aa, Artificial Sequence
  Peptide Derived from Human Papillomavirus
TSNINAGKDDR

SEQ ID NO: 34649 - protein, 11 aa, Artificial Sequence
  Peptide Derived from Human Papillomavirus
TTPCWHYIDNY

SEQ ID NO: 34650 - protein, 11 aa, Artificial Sequence
  Peptide Derived from Human Papillomavirus
VAAFGVTGTVA

SEQ ID NO: 34651 - protein, 10 aa, Artificial Sequence
  Peptide Derived from Human Papillomavirus
VDFIDNCNVY

SEQ ID NO: 34652 - protein, 8 aa, Artificial Sequence
  Peptide Derived from Human Papillomavirus
VDYNISPR

SEQ ID NO: 34653 - protein, 10 aa, Artificial Sequence
  Peptide Derived from Human Papillomavirus
VDYNISPRLK

SEQ ID NO: 34654 - protein, 11 aa, Artificial Sequence
  Peptide Derived from Human Papillomavirus
VDYNISPRLKA

SEQ ID NO: 34655 - protein, 8 aa, Artificial Sequence
  Peptide Derived from Human Papillomavirus
VFTFPNPF

SEQ ID NO: 34656 - protein, 10 aa, Artificial Sequence
  Peptide Derived from Human Papillomavirus
VFTFPNPFPF

SEQ ID NO: 34657 - protein, 8 aa, Artificial Sequence
  Peptide Derived from Human Papillomavirus
VLKTSNGK

SEQ ID NO: 34658 - protein, 9 aa, Artificial Sequence
  Peptide Derived from Human Papillomavirus
VLKTSNGKA

SEQ ID NO: 34659 - protein, 10 aa, Artificial Sequence
  Peptide Derived from Human Papillomavirus
VLKTSNGKAA

SEQ ID NO: 34660 - protein, 11 aa, Artificial Sequence
  Peptide Derived from Human Papillomavirus
VLQHSFNDTTF

SEQ ID NO: 34661 - protein, 8 aa, Artificial Sequence
  Peptide Derived from Human Papillomavirus
VMDDSEIA

SEQ ID NO: 34662 - protein, 9 aa, Artificial Sequence
  Peptide Derived from Human Papillomavirus
VMDDSEIAY

SEQ ID NO: 34663 - protein, 10 aa, Artificial Sequence
  Peptide Derived from Human Papillomavirus
VMDDSEIAYK

SEQ ID NO: 34664 - protein, 11 aa, Artificial Sequence
  Peptide Derived from Human Papillomavirus
VMDDSEIAYKY

SEQ ID NO: 34665 - protein, 8 aa, Artificial Sequence
  Peptide Derived from Human Papillomavirus
VMLMLVRF

SEQ ID NO: 34666 - protein, 9 aa, Artificial Sequence
  Peptide Derived from Human Papillomavirus
VMLMLVRFK

SEQ ID NO: 34667 - protein, 11 aa, Artificial Sequence
  Peptide Derived from Human Papillomavirus
VMLMLVRFKCA

SEQ ID NO: 34668 - protein, 8 aa, Artificial Sequence
  Peptide Derived from Human Papillomavirus
VSDEGDWR

SEQ ID NO: 34669 - protein, 8 aa, Artificial Sequence
  Peptide Derived from Human Papillomavirus
VSFLSALK

SEQ ID NO: 34670 - protein, 10 aa, Artificial Sequence
  Peptide Derived from Human Papillomavirus
VSFLSALKLF

SEQ ID NO: 34671 - protein, 8 aa, Artificial Sequence
  Peptide Derived from Human Papillomavirus
VSFMELIR

SEQ ID NO: 34672 - protein, 10 aa, Artificial Sequence
  Peptide Derived from Human Papillomavirus
VSFMELIRPF

SEQ ID NO: 34673 - protein, 8 aa, Artificial Sequence
  Peptide Derived from Human Papillomavirus
VSIDVKHK

SEQ ID NO: 34674 - protein, 9 aa, Artificial Sequence
  Peptide Derived from Human Papillomavirus
VSIDVKHKA

SEQ ID NO: 34675 - protein, 9 aa, Artificial Sequence
  Peptide Derived from Human Papillomavirus
VTGTVAEGF

SEQ ID NO: 34676 - protein, 10 aa, Artificial Sequence
  Peptide Derived from Human Papillomavirus
VTGTVAEGFK

SEQ ID NO: 34677 - protein, 9 aa, Artificial Sequence
  Peptide Derived from Human Papillomavirus
VVFTFPNPF

SEQ ID NO: 34678 - protein, 11 aa, Artificial Sequence
  Peptide Derived from Human Papillomavirus
VVFTFPNPFPF

SEQ ID NO: 34679 - protein, 10 aa, Artificial Sequence
  Peptide Derived from Human Papillomavirus
WFYVEAVIDR

SEQ ID NO: 34680 - protein, 10 aa, Artificial Sequence
  Peptide Derived from Human Papillomavirus
WGMVMLMLVR

SEQ ID NO: 34681 - protein, 11 aa, Artificial Sequence
  Peptide Derived from Human Papillomavirus
WGMVMLMLVRF

SEQ ID NO: 34682 - protein, 10 aa, Artificial Sequence
  Peptide Derived from Human Papillomavirus
WIERQTVLQH

SEQ ID NO: 34683 - protein, 8 aa, Artificial Sequence
  Peptide Derived from Human Papillomavirus
WIKSRCDK

SEQ ID NO: 34684 - protein, 8 aa, Artificial Sequence
  Peptide Derived from Human Papillomavirus
WLQPLADA

SEQ ID NO: 34685 - protein, 9 aa, Artificial Sequence
  Peptide Derived from Human Papillomavirus
WLQPLADAK

SEQ ID NO: 34686 - protein, 8 aa, Artificial Sequence
  Peptide Derived from Human Papillomavirus
YANSKSHF

SEQ ID NO: 34687 - protein, 11 aa, Artificial Sequence
  Peptide Derived from Human Papillomavirus
YAQLADSDSNA

SEQ ID NO: 34688 - protein, 8 aa, Artificial Sequence
  Peptide Derived from Human Papillomavirus
YCHLQSLA

SEQ ID NO: 34689 - protein, 11 aa, Artificial Sequence
  Peptide Derived from Human Papillomavirus
YCLYCHLQSLA

SEQ ID NO: 34690 - protein, 9 aa, Artificial Sequence
  Peptide Derived from Human Papillomavirus
YFGMSLISF

SEQ ID NO: 34691 - protein, 10 aa, Artificial Sequence
  Peptide Derived from Human Papillomavirus
YGETPEWIER

SEQ ID NO: 34692 - protein, 10 aa, Artificial Sequence
  Peptide Derived from Human Papillomavirus
YGVSFMELIR

SEQ ID NO: 34693 - protein, 9 aa, Artificial Sequence
  Peptide Derived from Human Papillomavirus
YIDNYLRNA

SEQ ID NO: 34694 - protein, 9 aa, Artificial Sequence
  Peptide Derived from Human Papillomavirus
YLHSRLVVF

SEQ ID NO: 34695 - protein, 11 aa, Artificial Sequence
  Peptide Derived from Human Papillomavirus
YLHSRLVVFTF

SEQ ID NO: 34696 - protein, 8 aa, Artificial Sequence
  Peptide Derived from Human Papillomavirus
YVEAVIDR

SEQ ID NO: 34697 - protein, 9 aa, Artificial Sequence
  Peptide Derived from Human Papillomavirus
AAACTNQTR

SEQ ID NO: 34698 - protein, 10 aa, Artificial Sequence
  Peptide Derived from Human Papillomavirus
AAACTNQTRA

SEQ ID NO: 34699 - protein, 8 aa, Artificial Sequence
  Peptide Derived from Human Papillomavirus
AACTNQTR

SEQ ID NO: 34700 - protein, 9 aa, Artificial Sequence
  Peptide Derived from Human Papillomavirus
AACTNQTRA

SEQ ID NO: 34701 - protein, 8 aa, Artificial Sequence
  Peptide Derived from Human Papillomavirus
ACTNQTRA

SEQ ID NO: 34702 - protein, 8 aa, Artificial Sequence
  Peptide Derived from Human Papillomavirus
AGGQVIVF

SEQ ID NO: 34703 - protein, 10 aa, Artificial Sequence
  Peptide Derived from Human Papillomavirus
AGIVTKLPTA

SEQ ID NO: 34704 - protein, 9 aa, Artificial Sequence
  Peptide Derived from Human Papillomavirus
ALGTSEGVR

SEQ ID NO: 34705 - protein, 10 aa, Artificial Sequence
  Peptide Derived from Human Papillomavirus
ALGTSEGVRR

SEQ ID NO: 34706 - protein, 11 aa, Artificial Sequence
  Peptide Derived from Human Papillomavirus
ALGTSEGVRRA

SEQ ID NO: 34707 - protein, 8 aa, Artificial Sequence
  Peptide Derived from Human Papillomavirus
ALSVSKAK

SEQ ID NO: 34708 - protein, 9 aa, Artificial Sequence
  Peptide Derived from Human Papillomavirus
ALSVSKAKA

SEQ ID NO: 34709 - protein, 9 aa, Artificial Sequence
  Peptide Derived from Human Papillomavirus
ATTPIIHLK

SEQ ID NO: 34710 - protein, 9 aa, Artificial Sequence
  Peptide Derived from Human Papillomavirus
ATTSTKRPR

SEQ ID NO: 34711 - protein, 10 aa, Artificial Sequence
  Peptide Derived from Human Papillomavirus
CALGTSEGVR

SEQ ID NO: 34712 - protein, 11 aa, Artificial Sequence
  Peptide Derived from Human Papillomavirus
CALGTSEGVRR

SEQ ID NO: 34713 - protein, 8 aa, Artificial Sequence
  Peptide Derived from Human Papillomavirus
CDHIDYWK

SEQ ID NO: 34714 - protein, 9 aa, Artificial Sequence
  Peptide Derived from Human Papillomavirus
CDHIDYWKH

SEQ ID NO: 34715 - protein, 11 aa, Artificial Sequence
  Peptide Derived from Human Papillomavirus
CDHIDYWKHIR

SEQ ID NO: 34716 - protein, 8 aa, Artificial Sequence
  Peptide Derived from Human Papillomavirus
CGVISAAA

SEQ ID NO: 34717 - protein, 8 aa, Artificial Sequence
  Peptide Derived from Human Papillomavirus
CLRYRLSK

SEQ ID NO: 34718 - protein, 9 aa, Artificial Sequence
  Peptide Derived from Human Papillomavirus
CLRYRLSKY

SEQ ID NO: 34719 - protein, 10 aa, Artificial Sequence
  Peptide Derived from Human Papillomavirus
CLRYRLSKYK

SEQ ID NO: 34720 - protein, 9 aa, Artificial Sequence
  Peptide Derived from Human Papillomavirus
CTDGKHKNA

SEQ ID NO: 34721 - protein, 11 aa, Artificial Sequence
  Peptide Derived from Human Papillomavirus
CTVVEGQVNCK

SEQ ID NO: 34722 - protein, 8 aa, Artificial Sequence
  Peptide Derived from Human Papillomavirus
CVLMYKAR

SEQ ID NO: 34723 - protein, 9 aa, Artificial Sequence
  Peptide Derived from Human Papillomavirus
DANILKCLR

SEQ ID NO: 34724 - protein, 10 aa, Artificial Sequence
  Peptide Derived from Human Papillomavirus
DANILKCLRY

SEQ ID NO: 34725 - protein, 11 aa, Artificial Sequence
  Peptide Derived from Human Papillomavirus
DANILKCLRYR

SEQ ID NO: 34726 - protein, 8 aa, Artificial Sequence
  Peptide Derived from Human Papillomavirus
DDFLNTVK

SEQ ID NO: 34727 - protein, 9 aa, Artificial Sequence
  Peptide Derived from Human Papillomavirus
DGDVHNTMH

SEQ ID NO: 34728 - protein, 10 aa, Artificial Sequence
  Peptide Derived from Human Papillomavirus
DGDVHNTMHY

SEQ ID NO: 34729 - protein, 8 aa, Artificial Sequence
  Peptide Derived from Human Papillomavirus
DSKRLCDH

SEQ ID NO: 34730 - protein, 11 aa, Artificial Sequence
  Peptide Derived from Human Papillomavirus
DSKRLCDHIDY

SEQ ID NO: 34731 - protein, 10 aa, Artificial Sequence
  Peptide Derived from Human Papillomavirus
DSVNCGVISA

SEQ ID NO: 34732 - protein, 11 aa, Artificial Sequence
  Peptide Derived from Human Papillomavirus
DSVNCGVISAA

SEQ ID NO: 34733 - protein, 8 aa, Artificial Sequence
  Peptide Derived from Human Papillomavirus
DVHNTMHY

SEQ ID NO: 34734 - protein, 9 aa, Artificial Sequence
  Peptide Derived from Human Papillomavirus
EAKKYGTGK

SEQ ID NO: 34735 - protein, 10 aa, Artificial Sequence
  Peptide Derived from Human Papillomavirus
EAKKYGTGKK

SEQ ID NO: 34736 - protein, 8 aa, Artificial Sequence
  Peptide Derived from Human Papillomavirus
ECVLMYKA

SEQ ID NO: 34737 - protein, 9 aa, Artificial Sequence
  Peptide Derived from Human Papillomavirus
ECVLMYKAR

SEQ ID NO: 34738 - protein, 10 aa, Artificial Sequence
  Peptide Derived from Human Papillomavirus
EGHITYFVNF

SEQ ID NO: 34739 - protein, 10 aa, Artificial Sequence
  Peptide Derived from Human Papillomavirus
EGQVNCKGIY

SEQ ID NO: 34740 - protein, 11 aa, Artificial Sequence
  Peptide Derived from Human Papillomavirus
EGQVNCKGIYY

SEQ ID NO: 34741 - protein, 11 aa, Artificial Sequence
  Peptide Derived from Human Papillomavirus
EGVRRATTSTK

SEQ ID NO: 34742 - protein, 10 aa, Artificial Sequence
  Peptide Derived from Human Papillomavirus
EISFAGIVTK

SEQ ID NO: 34743 - protein, 9 aa, Artificial Sequence
  Peptide Derived from Human Papillomavirus
EMGIHSINH

SEQ ID NO: 34744 - protein, 11 aa, Artificial Sequence
  Peptide Derived from Human Papillomavirus
ESVFSSDEISF

SEQ ID NO: 34745 - protein, 8 aa, Artificial Sequence
  Peptide Derived from Human Papillomavirus
ETLNNTEY

SEQ ID NO: 34746 - protein, 9 aa, Artificial Sequence
  Peptide Derived from Human Papillomavirus
ETLNNTEYK

SEQ ID NO: 34747 - protein, 11 aa, Artificial Sequence
  Peptide Derived from Human Papillomavirus
EVHAGGQVIVF

SEQ ID NO: 34748 - protein, 9 aa, Artificial Sequence
  Peptide Derived from Human Papillomavirus
EVQFDGDVH

SEQ ID NO: 34749 - protein, 11 aa, Artificial Sequence
  Peptide Derived from Human Papillomavirus
FAGIVTKLPTA

SEQ ID NO: 34750 - protein, 10 aa, Artificial Sequence
  Peptide Derived from Human Papillomavirus
FDGDVHNTMH

SEQ ID NO: 34751 - protein, 11 aa, Artificial Sequence
  Peptide Derived from Human Papillomavirus
FDGDVHNTMHY

SEQ ID NO: 34752 - protein, 8 aa, Artificial Sequence
  Peptide Derived from Human Papillomavirus
FSSDEISF

SEQ ID NO: 34753 - protein, 9 aa, Artificial Sequence
  Peptide Derived from Human Papillomavirus
FSSDEISFA

SEQ ID NO: 34754 - protein, 8 aa, Artificial Sequence
  Peptide Derived from Human Papillomavirus
FTEEAKKY

SEQ ID NO: 34755 - protein, 8 aa, Artificial Sequence
  Peptide Derived from Human Papillomavirus
FVNFTEEA

SEQ ID NO: 34756 - protein, 9 aa, Artificial Sequence
  Peptide Derived from Human Papillomavirus
FVNFTEEAK

SEQ ID NO: 34757 - protein, 10 aa, Artificial Sequence
  Peptide Derived from Human Papillomavirus
FVNFTEEAKK

SEQ ID NO: 34758 - protein, 11 aa, Artificial Sequence
  Peptide Derived from Human Papillomavirus
FVNFTEEAKKY

SEQ ID NO: 34759 - protein, 8 aa, Artificial Sequence
  Peptide Derived from Human Papillomavirus
GCLKKHGY

SEQ ID NO: 34760 - protein, 10 aa, Artificial Sequence
  Peptide Derived from Human Papillomavirus
GDANILKCLR

SEQ ID NO: 34761 - protein, 11 aa, Artificial Sequence
  Peptide Derived from Human Papillomavirus
GDANILKCLRY

SEQ ID NO: 34762 - protein, 8 aa, Artificial Sequence
  Peptide Derived from Human Papillomavirus
GDVHNTMH

SEQ ID NO: 34763 - protein, 9 aa, Artificial Sequence
  Peptide Derived from Human Papillomavirus
GDVHNTMHY

SEQ ID NO: 34764 - protein, 9 aa, Artificial Sequence
  Peptide Derived from Human Papillomavirus
GIVTKLPTA

SEQ ID NO: 34765 - protein, 9 aa, Artificial Sequence
  Peptide Derived from Human Papillomavirus
GIYYVHEGH

SEQ ID NO: 34766 - protein, 9 aa, Artificial Sequence
  Peptide Derived from Human Papillomavirus
GTGKKWEVH

SEQ ID NO: 34767 - protein, 10 aa, Artificial Sequence
  Peptide Derived from Human Papillomavirus
GTGKKWEVHA

SEQ ID NO: 34768 - protein, 8 aa, Artificial Sequence
  Peptide Derived from Human Papillomavirus
GTSEGVRR

SEQ ID NO: 34769 - protein, 9 aa, Artificial Sequence
  Peptide Derived from Human Papillomavirus
GTSEGVRRA

SEQ ID NO: 34770 - protein, 10 aa, Artificial Sequence
  Peptide Derived from Human Papillomavirus
GVRRATTSTK

SEQ ID NO: 34771 - protein, 11 aa, Artificial Sequence
  Peptide Derived from Human Papillomavirus
GVRRATTSTKR

SEQ ID NO: 34772 - protein, 9 aa, Artificial Sequence
  Peptide Derived from Human Papillomavirus
HAGGQVIVF

SEQ ID NO: 34773 - protein, 9 aa, Artificial Sequence
  Peptide Derived from Human Papillomavirus
HGYTVEVQF

SEQ ID NO: 34774 - protein, 9 aa, Artificial Sequence
  Peptide Derived from Human Papillomavirus
HIDYWKHIR

SEQ ID NO: 34775 - protein, 10 aa, Artificial Sequence
  Peptide Derived from Human Papillomavirus
HIRLECVLMY

SEQ ID NO: 34776 - protein, 11 aa, Artificial Sequence
  Peptide Derived from Human Papillomavirus
HIRLECVLMYK

SEQ ID NO: 34777 - protein, 8 aa, Artificial Sequence
  Peptide Derived from Human Papillomavirus
HITYFVNF

SEQ ID NO: 34778 - protein, 10 aa, Artificial Sequence
  Peptide Derived from Human Papillomavirus
HLKGDANILK

SEQ ID NO: 34779 - protein, 10 aa, Artificial Sequence
  Peptide Derived from Human Papillomavirus
HSINHQVVPA

SEQ ID NO: 34780 - protein, 8 aa, Artificial Sequence
  Peptide Derived from Human Papillomavirus
IDYWKHIR

SEQ ID NO: 34781 - protein, 8 aa, Artificial Sequence
  Peptide Derived from Human Papillomavirus
IIHLKGDA

SEQ ID NO: 34782 - protein, 10 aa, Artificial Sequence
  Peptide Derived from Human Papillomavirus
ILEHYENDSK

SEQ ID NO: 34783 - protein, 11 aa, Artificial Sequence
  Peptide Derived from Human Papillomavirus
ILEHYENDSKR

SEQ ID NO: 34784 - protein, 8 aa, Artificial Sequence
  Peptide Derived from Human Papillomavirus
ILKCLRYR

SEQ ID NO: 34785 - protein, 11 aa, Artificial Sequence
  Peptide Derived from Human Papillomavirus
ILKCLRYRLSK

SEQ ID NO: 34786 - protein, 11 aa, Artificial Sequence
  Peptide Derived from Human Papillomavirus
ISAAACTNQTR

SEQ ID NO: 34787 - protein, 9 aa, Artificial Sequence
  Peptide Derived from Human Papillomavirus
ISFAGIVTK

SEQ ID NO: 34788 - protein, 9 aa, Artificial Sequence
  Peptide Derived from Human Papillomavirus
ISTSQRDDF

SEQ ID NO: 34789 - protein, 11 aa, Artificial Sequence
  Peptide Derived from Human Papillomavirus
ITYFVNFTEEA

SEQ ID NO: 34790 - protein, 8 aa, Artificial Sequence
  Peptide Derived from Human Papillomavirus
IVFPESVF

SEQ ID NO: 34791 - protein, 8 aa, Artificial Sequence
  Peptide Derived from Human Papillomavirus
IVTKLPTA

SEQ ID NO: 34792 - protein, 8 aa, Artificial Sequence
  Peptide Derived from Human Papillomavirus
KAREMGIH

SEQ ID NO: 34793 - protein, 9 aa, Artificial Sequence
  Peptide Derived from Human Papillomavirus
KCLRYRLSK

SEQ ID NO: 34794 - protein, 10 aa, Artificial Sequence
  Peptide Derived from Human Papillomavirus
KCLRYRLSKY

SEQ ID NO: 34795 - protein, 11 aa, Artificial Sequence
  Peptide Derived from Human Papillomavirus
KCLRYRLSKYK

SEQ ID NO: 34796 - protein, 8 aa, Artificial Sequence
  Peptide Derived from Human Papillomavirus
KGDANILK

SEQ ID NO: 34797 - protein, 11 aa, Artificial Sequence
  Peptide Derived from Human Papillomavirus
KGDANILKCLR

SEQ ID NO: 34798 - protein, 10 aa, Artificial Sequence
  Peptide Derived from Human Papillomavirus
KGIYYVHEGH

SEQ ID NO: 34799 - protein, 11 aa, Artificial Sequence
  Peptide Derived from Human Papillomavirus
KILEHYENDSK

SEQ ID NO: 34800 - protein, 9 aa, Artificial Sequence
  Peptide Derived from Human Papillomavirus
LCDHIDYWK

SEQ ID NO: 34801 - protein, 10 aa, Artificial Sequence
  Peptide Derived from Human Papillomavirus
LCDHIDYWKH

SEQ ID NO: 34802 - protein, 8 aa, Artificial Sequence
  Peptide Derived from Human Papillomavirus
LGTSEGVR

SEQ ID NO: 34803 - protein, 9 aa, Artificial Sequence
  Peptide Derived from Human Papillomavirus
LGTSEGVRR

SEQ ID NO: 34804 - protein, 10 aa, Artificial Sequence
  Peptide Derived from Human Papillomavirus
LGTSEGVRRA

SEQ ID NO: 34805 - protein, 11 aa, Artificial Sequence
  Peptide Derived from Human Papillomavirus
LMYKAREMGIH

SEQ ID NO: 34806 - protein, 8 aa, Artificial Sequence
  Peptide Derived from Human Papillomavirus
LSKYKQLY

SEQ ID NO: 34807 - protein, 11 aa, Artificial Sequence
  Peptide Derived from Human Papillomavirus
LSQRLNVCQDK

SEQ ID NO: 34808 - protein, 8 aa, Artificial Sequence
  Peptide Derived from Human Papillomavirus
LSVSKAKA

SEQ ID NO: 34809 - protein, 11 aa, Artificial Sequence
  Peptide Derived from Human Papillomavirus
LSVSKAKALQA

SEQ ID NO: 34810 - protein, 9 aa, Artificial Sequence
  Peptide Derived from Human Papillomavirus
LTAPTGCLK

SEQ ID NO: 34811 - protein, 10 aa, Artificial Sequence
  Peptide Derived from Human Papillomavirus
LTAPTGCLKK

SEQ ID NO: 34812 - protein, 11 aa, Artificial Sequence
  Peptide Derived from Human Papillomavirus
LTAPTGCLKKH

SEQ ID NO: 34813 - protein, 9 aa, Artificial Sequence
  Peptide Derived from Human Papillomavirus
LTYISTSQR

SEQ ID NO: 34814 - protein, 8 aa, Artificial Sequence
  Peptide Derived from Human Papillomavirus
MGIHSINH

SEQ ID NO: 34815 - protein, 10 aa, Artificial Sequence
  Peptide Derived from Human Papillomavirus
MLETLNNTEY

SEQ ID NO: 34816 - protein, 11 aa, Artificial Sequence
  Peptide Derived from Human Papillomavirus
MLETLNNTEYK

SEQ ID NO: 34817 - protein, 11 aa, Artificial Sequence
  Peptide Derived from Human Papillomavirus
MMLETLNNTEY

SEQ ID NO: 34818 - protein, 8 aa, Artificial Sequence
  Peptide Derived from Human Papillomavirus
NAIVTLTY

SEQ ID NO: 34819 - protein, 8 aa, Artificial Sequence
  Peptide Derived from Human Papillomavirus
NCGVISAA

SEQ ID NO: 34820 - protein, 9 aa, Artificial Sequence
  Peptide Derived from Human Papillomavirus
NCGVISAAA

SEQ ID NO: 34821 - protein, 9 aa, Artificial Sequence
  Peptide Derived from Human Papillomavirus
NCKGIYYVH

SEQ ID NO: 34822 - protein, 9 aa, Artificial Sequence
  Peptide Derived from Human Papillomavirus
NDSKRLCDH

SEQ ID NO: 34823 - protein, 8 aa, Artificial Sequence
  Peptide Derived from Human Papillomavirus
NFTEEAKK

SEQ ID NO: 34824 - protein, 9 aa, Artificial Sequence
  Peptide Derived from Human Papillomavirus
NFTEEAKKY

SEQ ID NO: 34825 - protein, 8 aa, Artificial Sequence
  Peptide Derived from Human Papillomavirus
NILKCLRY

SEQ ID NO: 34826 - protein, 9 aa, Artificial Sequence
  Peptide Derived from Human Papillomavirus
NILKCLRYR

SEQ ID NO: 34827 - protein, 10 aa, Artificial Sequence
  Peptide Derived from Human Papillomavirus
NTHHPNKLLR

SEQ ID NO: 34828 - protein, 9 aa, Artificial Sequence
  Peptide Derived from Human Papillomavirus
NTMHYTNWK

SEQ ID NO: 34829 - protein, 10 aa, Artificial Sequence
  Peptide Derived from Human Papillomavirus
NTMHYTNWKF

SEQ ID NO: 34830 - protein, 8 aa, Artificial Sequence
  Peptide Derived from Human Papillomavirus
NTTTSNSK

SEQ ID NO: 34831 - protein, 11 aa, Artificial Sequence
  Peptide Derived from Human Papillomavirus
NTTTSNSKTCA

SEQ ID NO: 34832 - protein, 9 aa, Artificial Sequence
  Peptide Derived from Human Papillomavirus
NTVSVSTGY

SEQ ID NO: 34833 - protein, 10 aa, Artificial Sequence
  Peptide Derived from Human Papillomavirus
NVCQDKILEH

SEQ ID NO: 34834 - protein, 11 aa, Artificial Sequence
  Peptide Derived from Human Papillomavirus
NVCQDKILEHY

SEQ ID NO: 34835 - protein, 8 aa, Artificial Sequence
  Peptide Derived from Human Papillomavirus
PALSVSKA

SEQ ID NO: 34836 - protein, 9 aa, Artificial Sequence
  Peptide Derived from Human Papillomavirus
PALSVSKAK

SEQ ID NO: 34837 - protein, 10 aa, Artificial Sequence
  Peptide Derived from Human Papillomavirus
PALSVSKAKA

SEQ ID NO: 34838 - protein, 8 aa, Artificial Sequence
  Peptide Derived from Human Papillomavirus
PATTPIIH

SEQ ID NO: 34839 - protein, 10 aa, Artificial Sequence
  Peptide Derived from Human Papillomavirus
PATTPIIHLK

SEQ ID NO: 34840 - protein, 9 aa, Artificial Sequence
  Peptide Derived from Human Papillomavirus
PIIHLKGDA

SEQ ID NO: 34841 - protein, 8 aa, Artificial Sequence
  Peptide Derived from Human Papillomavirus
PTGCLKKH

SEQ ID NO: 34842 - protein, 10 aa, Artificial Sequence
  Peptide Derived from Human Papillomavirus
PTGCLKKHGY

SEQ ID NO: 34843 - protein, 8 aa, Artificial Sequence
  Peptide Derived from Human Papillomavirus
QDKILEHY

SEQ ID NO: 34844 - protein, 11 aa, Artificial Sequence
  Peptide Derived from Human Papillomavirus
QFDGDVHNTMH

SEQ ID NO: 34845 - protein, 11 aa, Artificial Sequence
  Peptide Derived from Human Papillomavirus
QLYEQVSSTWH

SEQ ID NO: 34846 - protein, 9 aa, Artificial Sequence
  Peptide Derived from Human Papillomavirus
QTRAVSCPA

SEQ ID NO: 34847 - protein, 10 aa, Artificial Sequence
  Peptide Derived from Human Papillomavirus
QTSLELYLTA

SEQ ID NO: 34848 - protein, 10 aa, Artificial Sequence
  Peptide Derived from Human Papillomavirus
QVIVFPESVF

SEQ ID NO: 34849 - protein, 8 aa, Artificial Sequence
  Peptide Derived from Human Papillomavirus
QVNCKGIY

SEQ ID NO: 34850 - protein, 9 aa, Artificial Sequence
  Peptide Derived from Human Papillomavirus
QVNCKGIYY

SEQ ID NO: 34851 - protein, 11 aa, Artificial Sequence
  Peptide Derived from Human Papillomavirus
QVNCKGIYYVH

SEQ ID NO: 34852 - protein, 10 aa, Artificial Sequence
  Peptide Derived from Human Papillomavirus
QVVPALSVSK

SEQ ID NO: 34853 - protein, 11 aa, Artificial Sequence
  Peptide Derived from Human Papillomavirus
QVVPALSVSKA

SEQ ID NO: 34854 - protein, 8 aa, Artificial Sequence
  Peptide Derived from Human Papillomavirus
RATTSTKR

SEQ ID NO: 34855 - protein, 10 aa, Artificial Sequence
  Peptide Derived from Human Papillomavirus
RATTSTKRPR

SEQ ID NO: 34856 - protein, 9 aa, Artificial Sequence
  Peptide Derived from Human Papillomavirus
RDDFLNTVK

SEQ ID NO: 34857 - protein, 8 aa, Artificial Sequence
  Peptide Derived from Human Papillomavirus
RLCDHIDY

SEQ ID NO: 34858 - protein, 10 aa, Artificial Sequence
  Peptide Derived from Human Papillomavirus
RLCDHIDYWK

SEQ ID NO: 34859 - protein, 11 aa, Artificial Sequence
  Peptide Derived from Human Papillomavirus
RLCDHIDYWKH

SEQ ID NO: 34860 - protein, 8 aa, Artificial Sequence
  Peptide Derived from Human Papillomavirus
RLECVLMY

SEQ ID NO: 34861 - protein, 9 aa, Artificial Sequence
  Peptide Derived from Human Papillomavirus
RLECVLMYK

SEQ ID NO: 34862 - protein, 10 aa, Artificial Sequence
  Peptide Derived from Human Papillomavirus
RLECVLMYKA

SEQ ID NO: 34863 - protein, 11 aa, Artificial Sequence
  Peptide Derived from Human Papillomavirus
RLECVLMYKAR

SEQ ID NO: 34864 - protein, 8 aa, Artificial Sequence
  Peptide Derived from Human Papillomavirus
RLNVCQDK

SEQ ID NO: 34865 - protein, 9 aa, Artificial Sequence
  Peptide Derived from Human Papillomavirus
RLSKYKQLY

SEQ ID NO: 34866 - protein, 10 aa, Artificial Sequence
  Peptide Derived from Human Papillomavirus
RTEPEHRNTH

SEQ ID NO: 34867 - protein, 11 aa, Artificial Sequence
  Peptide Derived from Human Papillomavirus
RTEPEHRNTHH

SEQ ID NO: 34868 - protein, 10 aa, Artificial Sequence
  Peptide Derived from Human Papillomavirus
SAAACTNQTR

SEQ ID NO: 34869 - protein, 11 aa, Artificial Sequence
  Peptide Derived from Human Papillomavirus
SAAACTNQTRA

SEQ ID NO: 34870 - protein, 10 aa, Artificial Sequence
  Peptide Derived from Human Papillomavirus
SCPATTPIIH

SEQ ID NO: 34871 - protein, 8 aa, Artificial Sequence
  Peptide Derived from Human Papillomavirus
SFAGIVTK

SEQ ID NO: 34872 - protein, 9 aa, Artificial Sequence
  Peptide Derived from Human Papillomavirus
SINHQVVPA

SEQ ID NO: 34873 - protein, 8 aa, Artificial Sequence
  Peptide Derived from Human Papillomavirus
SLELYLTA

SEQ ID NO: 34874 - protein, 8 aa, Artificial Sequence
  Peptide Derived from Human Papillomavirus
SSDEISFA

SEQ ID NO: 34875 - protein, 11 aa, Artificial Sequence
  Peptide Derived from Human Papillomavirus
STKRPRTEPEH

SEQ ID NO: 34876 - protein, 8 aa, Artificial Sequence
  Peptide Derived from Human Papillomavirus
STSQRDDF

SEQ ID NO: 34877 - protein, 11 aa, Artificial Sequence
  Peptide Derived from Human Papillomavirus
STWHWTCTDGK

SEQ ID NO: 34878 - protein, 10 aa, Artificial Sequence
  Peptide Derived from Human Papillomavirus
SVFSSDEISF

SEQ ID NO: 34879 - protein, 11 aa, Artificial Sequence
  Peptide Derived from Human Papillomavirus
SVFSSDEISFA

SEQ ID NO: 34880 - protein, 9 aa, Artificial Sequence
  Peptide Derived from Human Papillomavirus
SVNCGVISA

SEQ ID NO: 34881 - protein, 10 aa, Artificial Sequence
  Peptide Derived from Human Papillomavirus
SVNCGVISAA

SEQ ID NO: 34882 - protein, 11 aa, Artificial Sequence
  Peptide Derived from Human Papillomavirus
SVNCGVISAAA

SEQ ID NO: 34883 - protein, 10 aa, Artificial Sequence
  Peptide Derived from Human Papillomavirus
SVSKAKALQA

SEQ ID NO: 34884 - protein, 11 aa, Artificial Sequence
  Peptide Derived from Human Papillomavirus
TANNTTTSNSK

SEQ ID NO: 34885 - protein, 8 aa, Artificial Sequence
  Peptide Derived from Human Papillomavirus
TAPTGCLK

SEQ ID NO: 34886 - protein, 9 aa, Artificial Sequence
  Peptide Derived from Human Papillomavirus
TAPTGCLKK

SEQ ID NO: 34887 - protein, 10 aa, Artificial Sequence
  Peptide Derived from Human Papillomavirus
TAPTGCLKKH

SEQ ID NO: 34888 - protein, 11 aa, Artificial Sequence
  Peptide Derived from Human Papillomavirus
TCALGTSEGVR

SEQ ID NO: 34889 - protein, 8 aa, Artificial Sequence
  Peptide Derived from Human Papillomavirus
TCTDGKHK

SEQ ID NO: 34890 - protein, 10 aa, Artificial Sequence
  Peptide Derived from Human Papillomavirus
TCTDGKHKNA

SEQ ID NO: 34891 - protein, 8 aa, Artificial Sequence
  Peptide Derived from Human Papillomavirus
TDGKHKNA

SEQ ID NO: 34892 - protein, 9 aa, Artificial Sequence
  Peptide Derived from Human Papillomavirus
TGCLKKHGY

SEQ ID NO: 34893 - protein, 8 aa, Artificial Sequence
  Peptide Derived from Human Papillomavirus
TGKKWEVH

SEQ ID NO: 34894 - protein, 9 aa, Artificial Sequence
  Peptide Derived from Human Papillomavirus
TGKKWEVHA

SEQ ID NO: 34895 - protein, 8 aa, Artificial Sequence
  Peptide Derived from Human Papillomavirus
TLNNTEYK

SEQ ID NO: 34896 - protein, 10 aa, Artificial Sequence
  Peptide Derived from Human Papillomavirus
TLTYISTSQR

SEQ ID NO: 34897 - protein, 8 aa, Artificial Sequence
  Peptide Derived from Human Papillomavirus
TMHYTNWK

SEQ ID NO: 34898 - protein, 9 aa, Artificial Sequence
  Peptide Derived from Human Papillomavirus
TMHYTNWKF

SEQ ID NO: 34899 - protein, 11 aa, Artificial Sequence
  Peptide Derived from Human Papillomavirus
TMHYTNWKFIY

SEQ ID NO: 34900 - protein, 10 aa, Artificial Sequence
  Peptide Derived from Human Papillomavirus
TMQQTSLELY

SEQ ID NO: 34901 - protein, 8 aa, Artificial Sequence
  Peptide Derived from Human Papillomavirus
TSEGVRRA

SEQ ID NO: 34902 - protein, 9 aa, Artificial Sequence
  Peptide Derived from Human Papillomavirus
TSLELYLTA

SEQ ID NO: 34903 - protein, 8 aa, Artificial Sequence
  Peptide Derived from Human Papillomavirus
TSNSKTCA

SEQ ID NO: 34904 - protein, 8 aa, Artificial Sequence
  Peptide Derived from Human Papillomavirus
TTPIIHLK

SEQ ID NO: 34905 - protein, 11 aa, Artificial Sequence
  Peptide Derived from Human Papillomavirus
TTPIIHLKGDA

SEQ ID NO: 34906 - protein, 9 aa, Artificial Sequence
  Peptide Derived from Human Papillomavirus
TTSNSKTCA

SEQ ID NO: 34907 - protein, 8 aa, Artificial Sequence
  Peptide Derived from Human Papillomavirus
TTSTKRPR

SEQ ID NO: 34908 - protein, 10 aa, Artificial Sequence
  Peptide Derived from Human Papillomavirus
TTTSNSKTCA

SEQ ID NO: 34909 - protein, 11 aa, Artificial Sequence
  Peptide Derived from Human Papillomavirus
TVEVQFDGDVH

SEQ ID NO: 34910 - protein, 8 aa, Artificial Sequence
  Peptide Derived from Human Papillomavirus
TVSVSTGY

SEQ ID NO: 34911 - protein, 10 aa, Artificial Sequence
  Peptide Derived from Human Papillomavirus
TVVEGQVNCK

SEQ ID NO: 34912 - protein, 9 aa, Artificial Sequence
  Peptide Derived from Human Papillomavirus
VCQDKILEH

SEQ ID NO: 34913 - protein, 10 aa, Artificial Sequence
  Peptide Derived from Human Papillomavirus
VCQDKILEHY

SEQ ID NO: 34914 - protein, 11 aa, Artificial Sequence
  Peptide Derived from Human Papillomavirus
VDSVNCGVISA

SEQ ID NO: 34915 - protein, 9 aa, Artificial Sequence
  Peptide Derived from Human Papillomavirus
VFSSDEISF

SEQ ID NO: 34916 - protein, 10 aa, Artificial Sequence
  Peptide Derived from Human Papillomavirus
VFSSDEISFA

SEQ ID NO: 34917 - protein, 9 aa, Artificial Sequence
  Peptide Derived from Human Papillomavirus
VIVFPESVF

SEQ ID NO: 34918 - protein, 11 aa, Artificial Sequence
  Peptide Derived from Human Papillomavirus
VSCPATTPIIH

SEQ ID NO: 34919 - protein, 9 aa, Artificial Sequence
  Peptide Derived from Human Papillomavirus
VSKAKALQA

SEQ ID NO: 34920 - protein, 11 aa, Artificial Sequence
  Peptide Derived from Human Papillomavirus
VTLTYISTSQR

SEQ ID NO: 34921 - protein, 9 aa, Artificial Sequence
  Peptide Derived from Human Papillomavirus
VVEGQVNCK

SEQ ID NO: 34922 - protein, 9 aa, Artificial Sequence
  Peptide Derived from Human Papillomavirus
VVPALSVSK

SEQ ID NO: 34923 - protein, 10 aa, Artificial Sequence
  Peptide Derived from Human Papillomavirus
VVPALSVSKA

SEQ ID NO: 34924 - protein, 11 aa, Artificial Sequence
  Peptide Derived from Human Papillomavirus
VVPALSVSKAK

SEQ ID NO: 34925 - protein, 8 aa, Artificial Sequence
  Peptide Derived from Human Papillomavirus
WTCTDGKH

SEQ ID NO: 34926 - protein, 9 aa, Artificial Sequence
  Peptide Derived from Human Papillomavirus
WTCTDGKHK

SEQ ID NO: 34927 - protein, 11 aa, Artificial Sequence
  Peptide Derived from Human Papillomavirus
WTCTDGKHKNA

SEQ ID NO: 34928 - protein, 11 aa, Artificial Sequence
  Peptide Derived from Human Papillomavirus
WTMQQTSLELY

SEQ ID NO: 34929 - protein, 9 aa, Artificial Sequence
  Peptide Derived from Human Papillomavirus
YFVNFTEEA

SEQ ID NO: 34930 - protein, 10 aa, Artificial Sequence
  Peptide Derived from Human Papillomavirus
YFVNFTEEAK

SEQ ID NO: 34931 - protein, 11 aa, Artificial Sequence
  Peptide Derived from Human Papillomavirus
YFVNFTEEAKK

SEQ ID NO: 34932 - protein, 10 aa, Artificial Sequence
  Peptide Derived from Human Papillomavirus
YGTGKKWEVH

SEQ ID NO: 34933 - protein, 11 aa, Artificial Sequence
  Peptide Derived from Human Papillomavirus
YGTGKKWEVHA

SEQ ID NO: 34934 - protein, 10 aa, Artificial Sequence
  Peptide Derived from Human Papillomavirus
YISTSQRDDF

SEQ ID NO: 34935 - protein, 10 aa, Artificial Sequence
  Peptide Derived from Human Papillomavirus
YLTAPTGCLK

SEQ ID NO: 34936 - protein, 11 aa, Artificial Sequence
  Peptide Derived from Human Papillomavirus
YLTAPTGCLKK

SEQ ID NO: 34937 - protein, 8 aa, Artificial Sequence
  Peptide Derived from Human Papillomavirus
YTNWKFIY

SEQ ID NO: 34938 - protein, 9 aa, Artificial Sequence
  Peptide Derived from Human Papillomavirus
YVHEGHITY

SEQ ID NO: 34939 - protein, 10 aa, Artificial Sequence
  Peptide Derived from Human Papillomavirus
YVHEGHITYF

SEQ ID NO: 34940 - protein, 8 aa, Artificial Sequence
  Peptide Derived from Human Papillomavirus
ATSPLRCF

SEQ ID NO: 34941 - protein, 11 aa, Artificial Sequence
  Peptide Derived from Human Papillomavirus
ATSPLRCFCIY

SEQ ID NO: 34942 - protein, 8 aa, Artificial Sequence
  Peptide Derived from Human Papillomavirus
CFCIYVVF

SEQ ID NO: 34943 - protein, 10 aa, Artificial Sequence
  Peptide Derived from Human Papillomavirus
CFCIYVVFIY

SEQ ID NO: 34944 - protein, 11 aa, Artificial Sequence
  Peptide Derived from Human Papillomavirus
CFLLCFCVLLF

SEQ ID NO: 34945 - protein, 8 aa, Artificial Sequence
  Peptide Derived from Human Papillomavirus
CIYVVFIY

SEQ ID NO: 34946 - protein, 11 aa, Artificial Sequence
  Peptide Derived from Human Papillomavirus
CVLLFVCLVIR

SEQ ID NO: 34947 - protein, 9 aa, Artificial Sequence
  Peptide Derived from Human Papillomavirus
FCIYVVFIY

SEQ ID NO: 34948 - protein, 10 aa, Artificial Sequence
  Peptide Derived from Human Papillomavirus
FIYIPLFVIH

SEQ ID NO: 34949 - protein, 10 aa, Artificial Sequence
  Peptide Derived from Human Papillomavirus
FLLCFCVLLF

SEQ ID NO: 34950 - protein, 9 aa, Artificial Sequence
  Peptide Derived from Human Papillomavirus
FVIHTHASF

SEQ ID NO: 34951 - protein, 9 aa, Artificial Sequence
  Peptide Derived from Human Papillomavirus
IATSPLRCF

SEQ ID NO: 34952 - protein, 11 aa, Artificial Sequence
  Peptide Derived from Human Papillomavirus
ILWVIATSPLR

SEQ ID NO: 34953 - protein, 10 aa, Artificial Sequence
  Peptide Derived from Human Papillomavirus
ISTVSIVLCF

SEQ ID NO: 34954 - protein, 8 aa, Artificial Sequence
  Peptide Derived from Human Papillomavirus
IVILWVIA

SEQ ID NO: 34955 - protein, 9 aa, Artificial Sequence
  Peptide Derived from Human Papillomavirus
IVLCFLLCF

SEQ ID NO: 34956 - protein, 8 aa, Artificial Sequence
  Peptide Derived from Human Papillomavirus
LCFCVLLF

SEQ ID NO: 34957 - protein, 8 aa, Artificial Sequence
  Peptide Derived from Human Papillomavirus
LFVCLVIR

SEQ ID NO: 34958 - protein, 8 aa, Artificial Sequence
  Peptide Derived from Human Papillomavirus
LFVIHTHA

SEQ ID NO: 34959 - protein, 10 aa, Artificial Sequence
  Peptide Derived from Human Papillomavirus
LFVIHTHASF

SEQ ID NO: 34960 - protein, 9 aa, Artificial Sequence
  Peptide Derived from Human Papillomavirus
LIVILWVIA

SEQ ID NO: 34961 - protein, 9 aa, Artificial Sequence
  Peptide Derived from Human Papillomavirus
LLCFCVLLF

SEQ ID NO: 34962 - protein, 9 aa, Artificial Sequence
  Peptide Derived from Human Papillomavirus
LLFVCLVIR

SEQ ID NO: 34963 - protein, 10 aa, Artificial Sequence
  Peptide Derived from Human Papillomavirus
LLIVILWVIA

SEQ ID NO: 34964 - protein, 11 aa, Artificial Sequence
  Peptide Derived from Human Papillomavirus
LLLIVILWVIA

SEQ ID NO: 34965 - protein, 8 aa, Artificial Sequence
  Peptide Derived from Human Papillomavirus
LVLSVSVY

SEQ ID NO: 34966 - protein, 9 aa, Artificial Sequence
  Peptide Derived from Human Papillomavirus
LVLSVSVYA

SEQ ID NO: 34967 - protein, 11 aa, Artificial Sequence
  Peptide Derived from Human Papillomavirus
NISTVSIVLCF

SEQ ID NO: 34968 - protein, 8 aa, Artificial Sequence
  Peptide Derived from Human Papillomavirus
PLFVIHTH

SEQ ID NO: 34969 - protein, 9 aa, Artificial Sequence
  Peptide Derived from Human Papillomavirus
PLFVIHTHA

SEQ ID NO: 34970 - protein, 11 aa, Artificial Sequence
  Peptide Derived from Human Papillomavirus
PLFVIHTHASF

SEQ ID NO: 34971 - protein, 8 aa, Artificial Sequence
  Peptide Derived from Human Papillomavirus
PLRCFCIY

SEQ ID NO: 34972 - protein, 11 aa, Artificial Sequence
  Peptide Derived from Human Papillomavirus
PLRCFCIYVVF

SEQ ID NO: 34973 - protein, 9 aa, Artificial Sequence
  Peptide Derived from Human Papillomavirus
PLVLSVSVY

SEQ ID NO: 34974 - protein, 10 aa, Artificial Sequence
  Peptide Derived from Human Papillomavirus
PLVLSVSVYA

SEQ ID NO: 34975 - protein, 9 aa, Artificial Sequence
  Peptide Derived from Human Papillomavirus
RCFCIYVVF

SEQ ID NO: 34976 - protein, 11 aa, Artificial Sequence
  Peptide Derived from Human Papillomavirus
RCFCIYVVFIY

SEQ ID NO: 34977 - protein, 10 aa, Artificial Sequence
  Peptide Derived from Human Papillomavirus
SIVLCFLLCF

SEQ ID NO: 34978 - protein, 9 aa, Artificial Sequence
  Peptide Derived from Human Papillomavirus
STVSIVLCF

SEQ ID NO: 34979 - protein, 10 aa, Artificial Sequence
  Peptide Derived from Human Papillomavirus
TSPLRCFCIY

SEQ ID NO: 34980 - protein, 8 aa, Artificial Sequence
  Peptide Derived from Human Papillomavirus
TVSIVLCF

SEQ ID NO: 34981 - protein, 8 aa, Artificial Sequence
  Peptide Derived from Human Papillomavirus
VFIYIPLF

SEQ ID NO: 34982 - protein, 11 aa, Artificial Sequence
  Peptide Derived from Human Papillomavirus
VFIYIPLFVIH

SEQ ID NO: 34983 - protein, 8 aa, Artificial Sequence
  Peptide Derived from Human Papillomavirus
VIATSPLR

SEQ ID NO: 34984 - protein, 10 aa, Artificial Sequence
  Peptide Derived from Human Papillomavirus
VIATSPLRCF

SEQ ID NO: 34985 - protein, 8 aa, Artificial Sequence
  Peptide Derived from Human Papillomavirus
VIHTHASF

SEQ ID NO: 34986 - protein, 8 aa, Artificial Sequence
  Peptide Derived from Human Papillomavirus
VLCFLLCF

SEQ ID NO: 34987 - protein, 10 aa, Artificial Sequence
  Peptide Derived from Human Papillomavirus
VLLFVCLVIR

SEQ ID NO: 34988 - protein, 8 aa, Artificial Sequence
  Peptide Derived from Human Papillomavirus
VLSVSVYA

SEQ ID NO: 34989 - protein, 11 aa, Artificial Sequence
  Peptide Derived from Human Papillomavirus
VSIVLCFLLCF

SEQ ID NO: 34990 - protein, 9 aa, Artificial Sequence
  Peptide Derived from Human Papillomavirus
VVFIYIPLF

SEQ ID NO: 34991 - protein, 9 aa, Artificial Sequence
  Peptide Derived from Human Papillomavirus
WVIATSPLR

SEQ ID NO: 34992 - protein, 11 aa, Artificial Sequence
  Peptide Derived from Human Papillomavirus
WVIATSPLRCF

SEQ ID NO: 34993 - protein, 8 aa, Artificial Sequence
  Peptide Derived from Human Papillomavirus
YIPLFVIH

SEQ ID NO: 34994 - protein, 10 aa, Artificial Sequence
  Peptide Derived from Human Papillomavirus
YIPLFVIHTH

SEQ ID NO: 34995 - protein, 11 aa, Artificial Sequence
  Peptide Derived from Human Papillomavirus
YIPLFVIHTHA

SEQ ID NO: 34996 - protein, 10 aa, Artificial Sequence
  Peptide Derived from Human Papillomavirus
YVVFIYIPLF

SEQ ID NO: 34997 - protein, 9 aa, Artificial Sequence
  Peptide Derived from Human Papillomavirus
AFTDLTIVY

SEQ ID NO: 34998 - protein, 10 aa, Artificial Sequence
  Peptide Derived from Human Papillomavirus
AFTDLTIVYR

SEQ ID NO: 34999 - protein, 10 aa, Artificial Sequence
  Peptide Derived from Human Papillomavirus
ALEIPYDELR

SEQ ID NO: 35000 - protein, 9 aa, Artificial Sequence
  Peptide Derived from Human Papillomavirus
CIACWRRPR

SEQ ID NO: 35001 - protein, 11 aa, Artificial Sequence
  Peptide Derived from Human Papillomavirus
CLRFYSKVSEF

SEQ ID NO: 35002 - protein, 8 aa, Artificial Sequence
  Peptide Derived from Human Papillomavirus
CTKCLRFY

SEQ ID NO: 35003 - protein, 10 aa, Artificial Sequence
  Peptide Derived from Human Papillomavirus
CTKCLRFYSK

SEQ ID NO: 35004 - protein, 10 aa, Artificial Sequence
  Peptide Derived from Human Papillomavirus
DDTPHGVCTK

SEQ ID NO: 35005 - protein, 11 aa, Artificial Sequence
  Peptide Derived from Human Papillomavirus
DFAFTDLTIVY

SEQ ID NO: 35006 - protein, 11 aa, Artificial Sequence
  Peptide Derived from Human Papillomavirus
DLLIRCITCQR

SEQ ID NO: 35007 - protein, 9 aa, Artificial Sequence
  Peptide Derived from Human Papillomavirus
DTPHGVCTK

SEQ ID NO: 35008 - protein, 10 aa, Artificial Sequence
  Peptide Derived from Human Papillomavirus
EFRWYRYSVY

SEQ ID NO: 35009 - protein, 8 aa, Artificial Sequence
  Peptide Derived from Human Papillomavirus
EIPYDELR

SEQ ID NO: 35010 - protein, 8 aa, Artificial Sequence
  Peptide Derived from Human Papillomavirus
ELRLNCVY

SEQ ID NO: 35011 - protein, 10 aa, Artificial Sequence
  Peptide Derived from Human Papillomavirus
ELRLNCVYCK

SEQ ID NO: 35012 - protein, 10 aa, Artificial Sequence
  Peptide Derived from Human Papillomavirus
ELSSALEIPY

SEQ ID NO: 35013 - protein, 8 aa, Artificial Sequence
  Peptide Derived from Human Papillomavirus
ETEVLDFA

SEQ ID NO: 35014 - protein, 9 aa, Artificial Sequence
  Peptide Derived from Human Papillomavirus
ETEVLDFAF

SEQ ID NO: 35015 - protein, 10 aa, Artificial Sequence
  Peptide Derived from Human Papillomavirus
FAFTDLTIVY

SEQ ID NO: 35016 - protein, 11 aa, Artificial Sequence
  Peptide Derived from Human Papillomavirus
FAFTDLTIVYR

SEQ ID NO: 35017 - protein, 8 aa, Artificial Sequence
  Peptide Derived from Human Papillomavirus
FTDLTIVY

SEQ ID NO: 35018 - protein, 9 aa, Artificial Sequence
  Peptide Derived from Human Papillomavirus
FTDLTIVYR

SEQ ID NO: 35019 - protein, 10 aa, Artificial Sequence
  Peptide Derived from Human Papillomavirus
GGRWTGRCIA

SEQ ID NO: 35020 - protein, 8 aa, Artificial Sequence
  Peptide Derived from Human Papillomavirus
GICDLLIR

SEQ ID NO: 35021 - protein, 10 aa, Artificial Sequence
  Peptide Derived from Human Papillomavirus
GTTLEKLTNK

SEQ ID NO: 35022 - protein, 8 aa, Artificial Sequence
  Peptide Derived from Human Papillomavirus
GVCTKCLR

SEQ ID NO: 35023 - protein, 9 aa, Artificial Sequence
  Peptide Derived from Human Papillomavirus
GVCTKCLRF

SEQ ID NO: 35024 - protein, 10 aa, Artificial Sequence
  Peptide Derived from Human Papillomavirus
GVCTKCLRFY

SEQ ID NO: 35025 - protein, 9 aa, Artificial Sequence
  Peptide Derived from Human Papillomavirus
HGVCTKCLR

SEQ ID NO: 35026 - protein, 10 aa, Artificial Sequence
  Peptide Derived from Human Papillomavirus
HGVCTKCLRF

SEQ ID NO: 35027 - protein, 11 aa, Artificial Sequence
  Peptide Derived from Human Papillomavirus
HGVCTKCLRFY

SEQ ID NO: 35028 - protein, 8 aa, Artificial Sequence
  Peptide Derived from Human Papillomavirus
HLDKKKRF

SEQ ID NO: 35029 - protein, 9 aa, Artificial Sequence
  Peptide Derived from Human Papillomavirus
HLDKKKRFH

SEQ ID NO: 35030 - protein, 8 aa, Artificial Sequence
  Peptide Derived from Human Papillomavirus
IACWRRPR

SEQ ID NO: 35031 - protein, 8 aa, Artificial Sequence
  Peptide Derived from Human Papillomavirus
IGGRWTGR

SEQ ID NO: 35032 - protein, 11 aa, Artificial Sequence
  Peptide Derived from Human Papillomavirus
IGGRWTGRCIA

SEQ ID NO: 35033 - protein, 9 aa, Artificial Sequence
  Peptide Derived from Human Papillomavirus
IVYRDDTPH

SEQ ID NO: 35034 - protein, 8 aa, Artificial Sequence
  Peptide Derived from Human Papillomavirus
KCLRFYSK

SEQ ID NO: 35035 - protein, 9 aa, Artificial Sequence
  Peptide Derived from Human Papillomavirus
KGICDLLIR

SEQ ID NO: 35036 - protein, 8 aa, Artificial Sequence
  Peptide Derived from Human Papillomavirus
KLHELSSA

SEQ ID NO: 35037 - protein, 8 aa, Artificial Sequence
  Peptide Derived from Human Papillomavirus
KVSEFRWY

SEQ ID NO: 35038 - protein, 9 aa, Artificial Sequence
  Peptide Derived from Human Papillomavirus
KVSEFRWYR

SEQ ID NO: 35039 - protein, 10 aa, Artificial Sequence
  Peptide Derived from Human Papillomavirus
KVSEFRWYRY

SEQ ID NO: 35040 - protein, 8 aa, Artificial Sequence
  Peptide Derived from Human Papillomavirus
LCPEEKQR

SEQ ID NO: 35041 - protein, 9 aa, Artificial Sequence
  Peptide Derived from Human Papillomavirus
LCPEEKQRH

SEQ ID NO: 35042 - protein, 8 aa, Artificial Sequence
  Peptide Derived from Human Papillomavirus
LDKKKRFH

SEQ ID NO: 35043 - protein, 9 aa, Artificial Sequence
  Peptide Derived from Human Papillomavirus
LIRCITCQR

SEQ ID NO: 35044 - protein, 10 aa, Artificial Sequence
  Peptide Derived from Human Papillomavirus
LLIRCITCQR

SEQ ID NO: 35045 - protein, 9 aa, Artificial Sequence
  Peptide Derived from Human Papillomavirus
LSSALEIPY

SEQ ID NO: 35046 - protein, 9 aa, Artificial Sequence
  Peptide Derived from Human Papillomavirus
LTETEVLDF

SEQ ID NO: 35047 - protein, 10 aa, Artificial Sequence
  Peptide Derived from Human Papillomavirus
LTETEVLDFA

SEQ ID NO: 35048 - protein, 11 aa, Artificial Sequence
  Peptide Derived from Human Papillomavirus
LTETEVLDFAF

SEQ ID NO: 35049 - protein, 11 aa, Artificial Sequence
  Peptide Derived from Human Papillomavirus
LTIVYRDDTPH

SEQ ID NO: 35050 - protein, 8 aa, Artificial Sequence
  Peptide Derived from Human Papillomavirus
MFKNPAER

SEQ ID NO: 35051 - protein, 10 aa, Artificial Sequence
  Peptide Derived from Human Papillomavirus
MFKNPAERPR

SEQ ID NO: 35052 - protein, 11 aa, Artificial Sequence
  Peptide Derived from Human Papillomavirus
MFKNPAERPRK

SEQ ID NO: 35053 - protein, 9 aa, Artificial Sequence
  Peptide Derived from Human Papillomavirus
NIGGRWTGR

SEQ ID NO: 35054 - protein, 9 aa, Artificial Sequence
  Peptide Derived from Human Papillomavirus
PAERPRKLH

SEQ ID NO: 35055 - protein, 9 aa, Artificial Sequence
  Peptide Derived from Human Papillomavirus
PLCPEEKQR

SEQ ID NO: 35056 - protein, 10 aa, Artificial Sequence
  Peptide Derived from Human Papillomavirus
PLCPEEKQRH

SEQ ID NO: 35057 - protein, 10 aa, Artificial Sequence
  Peptide Derived from Human Papillomavirus
QLTETEVLDF

SEQ ID NO: 35058 - protein, 11 aa, Artificial Sequence
  Peptide Derived from Human Papillomavirus
QLTETEVLDFA

SEQ ID NO: 35059 - protein, 8 aa, Artificial Sequence
  Peptide Derived from Human Papillomavirus
RCIACWRR

SEQ ID NO: 35060 - protein, 10 aa, Artificial Sequence
  Peptide Derived from Human Papillomavirus
RCIACWRRPR

SEQ ID NO: 35061 - protein, 11 aa, Artificial Sequence
  Peptide Derived from Human Papillomavirus
RDDTPHGVCTK

SEQ ID NO: 35062 - protein, 8 aa, Artificial Sequence
  Peptide Derived from Human Papillomavirus
RFHNIGGR

SEQ ID NO: 35063 - protein, 9 aa, Artificial Sequence
  Peptide Derived from Human Papillomavirus
RFYSKVSEF

SEQ ID NO: 35064 - protein, 10 aa, Artificial Sequence
  Peptide Derived from Human Papillomavirus
RFYSKVSEFR

SEQ ID NO: 35065 - protein, 8 aa, Artificial Sequence
  Peptide Derived from Human Papillomavirus
RLNCVYCK

SEQ ID NO: 35066 - protein, 11 aa, Artificial Sequence
  Peptide Derived from Human Papillomavirus
SALEIPYDELR

SEQ ID NO: 35067 - protein, 8 aa, Artificial Sequence
  Peptide Derived from Human Papillomavirus
SSALEIPY

SEQ ID NO: 35068 - protein, 9 aa, Artificial Sequence
  Peptide Derived from Human Papillomavirus
SVYGTTLEK

SEQ ID NO: 35069 - protein, 11 aa, Artificial Sequence
  Peptide Derived from Human Papillomavirus
TCQRPLCPEEK

SEQ ID NO: 35070 - protein, 8 aa, Artificial Sequence
  Peptide Derived from Human Papillomavirus
TDLTIVYR

SEQ ID NO: 35071 - protein, 9 aa, Artificial Sequence
  Peptide Derived from Human Papillomavirus
TGRCIACWR

SEQ ID NO: 35072 - protein, 10 aa, Artificial Sequence
  Peptide Derived from Human Papillomavirus
TGRCIACWRR

SEQ ID NO: 35073 - protein, 10 aa, Artificial Sequence
  Peptide Derived from Human Papillomavirus
TIVYRDDTPH

SEQ ID NO: 35074 - protein, 8 aa, Artificial Sequence
  Peptide Derived from Human Papillomavirus
TLEKLTNK

SEQ ID NO: 35075 - protein, 9 aa, Artificial Sequence
  Peptide Derived from Human Papillomavirus
TTLEKLTNK

SEQ ID NO: 35076 - protein, 8 aa, Artificial Sequence
  Peptide Derived from Human Papillomavirus
VCTKCLRF

SEQ ID NO: 35077 - protein, 9 aa, Artificial Sequence
  Peptide Derived from Human Papillomavirus
VCTKCLRFY

SEQ ID NO: 35078 - protein, 11 aa, Artificial Sequence
  Peptide Derived from Human Papillomavirus
VCTKCLRFYSK

SEQ ID NO: 35079 - protein, 8 aa, Artificial Sequence
  Peptide Derived from Human Papillomavirus
VSEFRWYR

SEQ ID NO: 35080 - protein, 9 aa, Artificial Sequence
  Peptide Derived from Human Papillomavirus
VSEFRWYRY

SEQ ID NO: 35081 - protein, 10 aa, Artificial Sequence
  Peptide Derived from Human Papillomavirus
WTGRCIACWR

SEQ ID NO: 35082 - protein, 11 aa, Artificial Sequence
  Peptide Derived from Human Papillomavirus
WTGRCIACWRR

SEQ ID NO: 35083 - protein, 10 aa, Artificial Sequence
  Peptide Derived from Human Papillomavirus
YDELRLNCVY

SEQ ID NO: 35084 - protein, 11 aa, Artificial Sequence
  Peptide Derived from Human Papillomavirus
YGTTLEKLTNK

SEQ ID NO: 35085 - protein, 8 aa, Artificial Sequence
  Peptide Derived from Human Papillomavirus
YSKVSEFR

SEQ ID NO: 35086 - protein, 10 aa, Artificial Sequence
  Peptide Derived from Human Papillomavirus
YSKVSEFRWY

SEQ ID NO: 35087 - protein, 11 aa, Artificial Sequence
  Peptide Derived from Human Papillomavirus
YSKVSEFRWYR

SEQ ID NO: 35088 - protein, 10 aa, Artificial Sequence
  Peptide Derived from Human Papillomavirus
YSVYGTTLEK

SEQ ID NO: 35089 - protein, 11 aa, Artificial Sequence
  Peptide Derived from Human Papillomavirus
AGQAEPDTSNY

SEQ ID NO: 35090 - protein, 9 aa, Artificial Sequence
  Peptide Derived from Human Papillomavirus
CCQCKSTLR

SEQ ID NO: 35091 - protein, 10 aa, Artificial Sequence
  Peptide Derived from Human Papillomavirus
CVQSTQVDIR

SEQ ID NO: 35092 - protein, 10 aa, Artificial Sequence
  Peptide Derived from Human Papillomavirus
DLQPEATDLH

SEQ ID NO: 35093 - protein, 10 aa, Artificial Sequence
  Peptide Derived from Human Papillomavirus
DTSNYNIVTF

SEQ ID NO: 35094 - protein, 10 aa, Artificial Sequence
  Peptide Derived from Human Papillomavirus
DVIDSPAGQA

SEQ ID NO: 35095 - protein, 8 aa, Artificial Sequence
  Peptide Derived from Human Papillomavirus
EATDLHCY

SEQ ID NO: 35096 - protein, 8 aa, Artificial Sequence
  Peptide Derived from Human Papillomavirus
EDVIDSPA

SEQ ID NO: 35097 - protein, 11 aa, Artificial Sequence
  Peptide Derived from Human Papillomavirus
EDVIDSPAGQA

SEQ ID NO: 35098 - protein, 8 aa, Artificial Sequence
  Peptide Derived from Human Papillomavirus
ETPTLQDY

SEQ ID NO: 35099 - protein, 10 aa, Artificial Sequence
  Peptide Derived from Human Papillomavirus
FCCQCKSTLR

SEQ ID NO: 35100 - protein, 11 aa, Artificial Sequence
  Peptide Derived from Human Papillomavirus
FGIVCPNCSTR

SEQ ID NO: 35101 - protein, 10 aa, Artificial Sequence
  Peptide Derived from Human Papillomavirus
GIVCPNCSTR

SEQ ID NO: 35102 - protein, 8 aa, Artificial Sequence
  Peptide Derived from Human Papillomavirus
IDSPAGQA

SEQ ID NO: 35103 - protein, 10 aa, Artificial Sequence
  Peptide Derived from Human Papillomavirus
ILQELLMGSF

SEQ ID NO: 35104 - protein, 9 aa, Artificial Sequence
  Peptide Derived from Human Papillomavirus
IVCPNCSTR

SEQ ID NO: 35105 - protein, 9 aa, Artificial Sequence
  Peptide Derived from Human Papillomavirus
IVTFCCQCK

SEQ ID NO: 35106 - protein, 11 aa, Artificial Sequence
  Peptide Derived from Human Papillomavirus
LCVQSTQVDIR

SEQ ID NO: 35107 - protein, 11 aa, Artificial Sequence
  Peptide Derived from Human Papillomavirus
LDLQPEATDLH

SEQ ID NO: 35108 - protein, 10 aa, Artificial Sequence
  Peptide Derived from Human Papillomavirus
NIVTFCCQCK

SEQ ID NO: 35109 - protein, 11 aa, Artificial Sequence
  Peptide Derived from Human Papillomavirus
PDTSNYNIVTF

SEQ ID NO: 35110 - protein, 9 aa, Artificial Sequence
  Peptide Derived from Human Papillomavirus
QAEPDTSNY

SEQ ID NO: 35111 - protein, 11 aa, Artificial Sequence
  Peptide Derived from Human Papillomavirus
QDYVLDLQPEA

SEQ ID NO: 35112 - protein, 8 aa, Artificial Sequence
  Peptide Derived from Human Papillomavirus
QSTQVDIR

SEQ ID NO: 35113 - protein, 10 aa, Artificial Sequence
  Peptide Derived from Human Papillomavirus
RGETPTLQDY

SEQ ID NO: 35114 - protein, 11 aa, Artificial Sequence
  Peptide Derived from Human Papillomavirus
RILQELLMGSF

SEQ ID NO: 35115 - protein, 11 aa, Artificial Sequence
  Peptide Derived from Human Papillomavirus
SDEEDVIDSPA

SEQ ID NO: 35116 - protein, 11 aa, Artificial Sequence
  Peptide Derived from Human Papillomavirus
TFCCQCKSTLR

SEQ ID NO: 35117 - protein, 9 aa, Artificial Sequence
  Peptide Derived from Human Papillomavirus
TSNYNIVTF

SEQ ID NO: 35118 - protein, 8 aa, Artificial Sequence
  Peptide Derived from Human Papillomavirus
VCPNCSTR

SEQ ID NO: 35119 - protein, 9 aa, Artificial Sequence
  Peptide Derived from Human Papillomavirus
VIDSPAGQA

SEQ ID NO: 35120 - protein, 8 aa, Artificial Sequence
  Peptide Derived from Human Papillomavirus
VLDLQPEA

SEQ ID NO: 35121 - protein, 8 aa, Artificial Sequence
  Peptide Derived from Human Papillomavirus
VTFCCQCK

SEQ ID NO: 35122 - protein, 9 aa, Artificial Sequence
  Peptide Derived from Human Papillomavirus
YVLDLQPEA

SEQ ID NO: 35123 - protein, 10 aa, Artificial Sequence
  Peptide Derived from Human Papillomavirus
AAIANSDTTF

SEQ ID NO: 35124 - protein, 11 aa, Artificial Sequence
  Peptide Derived from Human Papillomavirus
AAIANSDTTFK

SEQ ID NO: 35125 - protein, 9 aa, Artificial Sequence
  Peptide Derived from Human Papillomavirus
ACVGLEVGR

SEQ ID NO: 35126 - protein, 8 aa, Artificial Sequence
  Peptide Derived from Human Papillomavirus
ADIMTYIH

SEQ ID NO: 35127 - protein, 10 aa, Artificial Sequence
  Peptide Derived from Human Papillomavirus
ADLDQFPLGR

SEQ ID NO: 35128 - protein, 11 aa, Artificial Sequence
  Peptide Derived from Human Papillomavirus
ADLDQFPLGRK

SEQ ID NO: 35129 - protein, 9 aa, Artificial Sequence
  Peptide Derived from Human Papillomavirus
AGGPGTDNR

SEQ ID NO: 35130 - protein, 9 aa, Artificial Sequence
  Peptide Derived from Human Papillomavirus
AGKRSAPSA

SEQ ID NO: 35131 - protein, 11 aa, Artificial Sequence
  Peptide Derived from Human Papillomavirus
AGSARLLTVGH

SEQ ID NO: 35132 - protein, 8 aa, Artificial Sequence
  Peptide Derived from Human Papillomavirus
AGYRARPK

SEQ ID NO: 35133 - protein, 9 aa, Artificial Sequence
  Peptide Derived from Human Papillomavirus
AGYRARPKF

SEQ ID NO: 35134 - protein, 10 aa, Artificial Sequence
  Peptide Derived from Human Papillomavirus
AGYRARPKFK

SEQ ID NO: 35135 - protein, 11 aa, Artificial Sequence
  Peptide Derived from Human Papillomavirus
AGYRARPKFKA

SEQ ID NO: 35136 - protein, 9 aa, Artificial Sequence
  Peptide Derived from Human Papillomavirus
AIANSDTTF

SEQ ID NO: 35137 - protein, 10 aa, Artificial Sequence
  Peptide Derived from Human Papillomavirus
AIANSDTTFK

SEQ ID NO: 35138 - protein, 8 aa, Artificial Sequence
  Peptide Derived from Human Papillomavirus
AILEDWNF

SEQ ID NO: 35139 - protein, 8 aa, Artificial Sequence
  Peptide Derived from Human Papillomavirus
AITCQKTA

SEQ ID NO: 35140 - protein, 11 aa, Artificial Sequence
  Peptide Derived from Human Papillomavirus
AITCQKTAPQK

SEQ ID NO: 35141 - protein, 11 aa, Artificial Sequence
  Peptide Derived from Human Papillomavirus
AMDFTALQDTK

SEQ ID NO: 35142 - protein, 8 aa, Artificial Sequence
  Peptide Derived from Human Papillomavirus
ASTTTPAK

SEQ ID NO: 35143 - protein, 9 aa, Artificial Sequence
  Peptide Derived from Human Papillomavirus
ASTTTPAKR

SEQ ID NO: 35144 - protein, 10 aa, Artificial Sequence
  Peptide Derived from Human Papillomavirus
ASTTTPAKRK

SEQ ID NO: 35145 - protein, 11 aa, Artificial Sequence
  Peptide Derived from Human Papillomavirus
ASTTTPAKRKK

SEQ ID NO: 35146 - protein, 8 aa, Artificial Sequence
  Peptide Derived from Human Papillomavirus
ATLANSTY

SEQ ID NO: 35147 - protein, 9 aa, Artificial Sequence
  Peptide Derived from Human Papillomavirus
ATLANSTYF

SEQ ID NO: 35148 - protein, 11 aa, Artificial Sequence
  Peptide Derived from Human Papillomavirus
CAAIANSDTTF

SEQ ID NO: 35149 - protein, 8 aa, Artificial Sequence
  Peptide Derived from Human Papillomavirus
CVGLEVGR

SEQ ID NO: 35150 - protein, 9 aa, Artificial Sequence
  Peptide Derived from Human Papillomavirus
DAQIFNKPY

SEQ ID NO: 35151 - protein, 8 aa, Artificial Sequence
  Peptide Derived from Human Papillomavirus
DCPPLELK

SEQ ID NO: 35152 - protein, 8 aa, Artificial Sequence
  Peptide Derived from Human Papillomavirus
DDTENSNR

SEQ ID NO: 35153 - protein, 9 aa, Artificial Sequence
  Peptide Derived from Human Papillomavirus
DDTENSNRY

SEQ ID NO: 35154 - protein, 10 aa, Artificial Sequence
  Peptide Derived from Human Papillomavirus
DDTENSNRYA

SEQ ID NO: 35155 - protein, 9 aa, Artificial Sequence
  Peptide Derived from Human Papillomavirus
DFTALQDTK

SEQ ID NO: 35156 - protein, 9 aa, Artificial Sequence
  Peptide Derived from Human Papillomavirus
DGDMVDTGF

SEQ ID NO: 35157 - protein, 11 aa, Artificial Sequence
  Peptide Derived from Human Papillomavirus
DGDMVDTGFGA

SEQ ID NO: 35158 - protein, 8 aa, Artificial Sequence
  Peptide Derived from Human Papillomavirus
DICNSICK

SEQ ID NO: 35159 - protein, 9 aa, Artificial Sequence
  Peptide Derived from Human Papillomavirus
DICNSICKY

SEQ ID NO: 35160 - protein, 9 aa, Artificial Sequence
  Peptide Derived from Human Papillomavirus
DLDQFPLGR

SEQ ID NO: 35161 - protein, 10 aa, Artificial Sequence
  Peptide Derived from Human Papillomavirus
DLDQFPLGRK

SEQ ID NO: 35162 - protein, 11 aa, Artificial Sequence
  Peptide Derived from Human Papillomavirus
DLDQFPLGRKF

SEQ ID NO: 35163 - protein, 10 aa, Artificial Sequence
  Peptide Derived from Human Papillomavirus
DLQFIFQLCK

SEQ ID NO: 35164 - protein, 11 aa, Artificial Sequence
  Peptide Derived from Human Papillomavirus
DLYIKGSGSTA

SEQ ID NO: 35165 - protein, 9 aa, Artificial Sequence
  Peptide Derived from Human Papillomavirus
DMVDTGFGA

SEQ ID NO: 35166 - protein, 8 aa, Artificial Sequence
  Peptide Derived from Human Papillomavirus
DTENSNRY

SEQ ID NO: 35167 - protein, 9 aa, Artificial Sequence
  Peptide Derived from Human Papillomavirus
DTENSNRYA

SEQ ID NO: 35168 - protein, 9 aa, Artificial Sequence
  Peptide Derived from Human Papillomavirus
DTGFGAMDF

SEQ ID NO: 35169 - protein, 11 aa, Artificial Sequence
  Peptide Derived from Human Papillomavirus
DTGFGAMDFTA

SEQ ID NO: 35170 - protein, 8 aa, Artificial Sequence
  Peptide Derived from Human Papillomavirus
DTLFFYLR

SEQ ID NO: 35171 - protein, 9 aa, Artificial Sequence
  Peptide Derived from Human Papillomavirus
DTLFFYLRR

SEQ ID NO: 35172 - protein, 11 aa, Artificial Sequence
  Peptide Derived from Human Papillomavirus
DTSFYNPETQR

SEQ ID NO: 35173 - protein, 9 aa, Artificial Sequence
  Peptide Derived from Human Papillomavirus
DTTFKSSNF

SEQ ID NO: 35174 - protein, 10 aa, Artificial Sequence
  Peptide Derived from Human Papillomavirus
DTTFKSSNFK

SEQ ID NO: 35175 - protein, 10 aa, Artificial Sequence
  Peptide Derived from Human Papillomavirus
DTYRFVTSQA

SEQ ID NO: 35176 - protein, 8 aa, Artificial Sequence
  Peptide Derived from Human Papillomavirus
ECISMDYK

SEQ ID NO: 35177 - protein, 9 aa, Artificial Sequence
  Peptide Derived from Human Papillomavirus
EDPFKDYVF

SEQ ID NO: 35178 - protein, 11 aa, Artificial Sequence
  Peptide Derived from Human Papillomavirus
EDTYRFVTSQA

SEQ ID NO: 35179 - protein, 8 aa, Artificial Sequence
  Peptide Derived from Human Papillomavirus
EFDLQFIF

SEQ ID NO: 35180 - protein, 8 aa, Artificial Sequence
  Peptide Derived from Human Papillomavirus
ESVPTDLY

SEQ ID NO: 35181 - protein, 10 aa, Artificial Sequence
  Peptide Derived from Human Papillomavirus
ESVPTDLYIK

SEQ ID NO: 35182 - protein, 8 aa, Artificial Sequence
  Peptide Derived from Human Papillomavirus
ETQRLVWA

SEQ ID NO: 35183 - protein, 8 aa, Artificial Sequence
  Peptide Derived from Human Papillomavirus
EVNLKEKF

SEQ ID NO: 35184 - protein, 10 aa, Artificial Sequence
  Peptide Derived from Human Papillomavirus
EVNLKEKFSA

SEQ ID NO: 35185 - protein, 9 aa, Artificial Sequence
  Peptide Derived from Human Papillomavirus
FDDTENSNR

SEQ ID NO: 35186 - protein, 10 aa, Artificial Sequence
  Peptide Derived from Human Papillomavirus
FDDTENSNRY

SEQ ID NO: 35187 - protein, 11 aa, Artificial Sequence
  Peptide Derived from Human Papillomavirus
FDDTENSNRYA

SEQ ID NO: 35188 - protein, 11 aa, Artificial Sequence
  Peptide Derived from Human Papillomavirus
FDLQFIFQLCK

SEQ ID NO: 35189 - protein, 10 aa, Artificial Sequence
  Peptide Derived from Human Papillomavirus
FFYLRREQMF

SEQ ID NO: 35190 - protein, 8 aa, Artificial Sequence
  Peptide Derived from Human Papillomavirus
FGAMDFTA

SEQ ID NO: 35191 - protein, 8 aa, Artificial Sequence
  Peptide Derived from Human Papillomavirus
FGFPDTSF

SEQ ID NO: 35192 - protein, 9 aa, Artificial Sequence
  Peptide Derived from Human Papillomavirus
FGFPDTSFY

SEQ ID NO: 35193 - protein, 8 aa, Artificial Sequence
  Peptide Derived from Human Papillomavirus
FLLQAGYR

SEQ ID NO: 35194 - protein, 9 aa, Artificial Sequence
  Peptide Derived from Human Papillomavirus
FLLQAGYRA

SEQ ID NO: 35195 - protein, 10 aa, Artificial Sequence
  Peptide Derived from Human Papillomavirus
FLLQAGYRAR

SEQ ID NO: 35196 - protein, 8 aa, Artificial Sequence
  Peptide Derived from Human Papillomavirus
FSADLDQF

SEQ ID NO: 35197 - protein, 8 aa, Artificial Sequence
  Peptide Derived from Human Papillomavirus
FTALQDTK

SEQ ID NO: 35198 - protein, 8 aa, Artificial Sequence
  Peptide Derived from Human Papillomavirus
FVRHFFNR

SEQ ID NO: 35199 - protein, 11 aa, Artificial Sequence
  Peptide Derived from Human Papillomavirus
FVTSQAITCQK

SEQ ID NO: 35200 - protein, 9 aa, Artificial Sequence
  Peptide Derived from Human Papillomavirus
FVTVVDTTR

SEQ ID NO: 35201 - protein, 9 aa, Artificial Sequence
  Peptide Derived from Human Papillomavirus
GCKPPIGEH

SEQ ID NO: 35202 - protein, 9 aa, Artificial Sequence
  Peptide Derived from Human Papillomavirus
GDCPPLELK

SEQ ID NO: 35203 - protein, 8 aa, Artificial Sequence
  Peptide Derived from Human Papillomavirus
GDMVDTGF

SEQ ID NO: 35204 - protein, 10 aa, Artificial Sequence
  Peptide Derived from Human Papillomavirus
GDMVDTGFGA

SEQ ID NO: 35205 - protein, 9 aa, Artificial Sequence
  Peptide Derived from Human Papillomavirus
GDTLFFYLR

SEQ ID NO: 35206 - protein, 10 aa, Artificial Sequence
  Peptide Derived from Human Papillomavirus
GDTLFFYLRR

SEQ ID NO: 35207 - protein, 9 aa, Artificial Sequence
  Peptide Derived from Human Papillomavirus
GFGAMDFTA

SEQ ID NO: 35208 - protein, 8 aa, Artificial Sequence
  Peptide Derived from Human Papillomavirus
GFPDTSFY

SEQ ID NO: 35209 - protein, 8 aa, Artificial Sequence
  Peptide Derived from Human Papillomavirus
GGPGTDNR

SEQ ID NO: 35210 - protein, 9 aa, Artificial Sequence
  Peptide Derived from Human Papillomavirus
GICWGNQLF

SEQ ID NO: 35211 - protein, 10 aa, Artificial Sequence
  Peptide Derived from Human Papillomavirus
GISGHPLLNK

SEQ ID NO: 35212 - protein, 11 aa, Artificial Sequence
  Peptide Derived from Human Papillomavirus
GISGHPLLNKF

SEQ ID NO: 35213 - protein, 8 aa, Artificial Sequence
  Peptide Derived from Human Papillomavirus
GLQYRVFR

SEQ ID NO: 35214 - protein, 10 aa, Artificial Sequence
  Peptide Derived from Human Papillomavirus
GLQYRVFRVR

SEQ ID NO: 35215 - protein, 10 aa, Artificial Sequence
  Peptide Derived from Human Papillomavirus
GSARLLTVGH

SEQ ID NO: 35216 - protein, 9 aa, Artificial Sequence
  Peptide Derived from Human Papillomavirus
GSGSTATLA

SEQ ID NO: 35217 - protein, 8 aa, Artificial Sequence
  Peptide Derived from Human Papillomavirus
GSLEDTYR

SEQ ID NO: 35218 - protein, 9 aa, Artificial Sequence
  Peptide Derived from Human Papillomavirus
GSLEDTYRF

SEQ ID NO: 35219 - protein, 8 aa, Artificial Sequence
  Peptide Derived from Human Papillomavirus
GSMVTSDA

SEQ ID NO: 35220 - protein, 11 aa, Artificial Sequence
  Peptide Derived from Human Papillomavirus
GSMVTSDAQIF

SEQ ID NO: 35221 - protein, 8 aa, Artificial Sequence
  Peptide Derived from Human Papillomavirus
GSPCSNNA

SEQ ID NO: 35222 - protein, 11 aa, Artificial Sequence
  Peptide Derived from Human Papillomavirus
GSTATLANSTY

SEQ ID NO: 35223 - protein, 9 aa, Artificial Sequence
  Peptide Derived from Human Papillomavirus
HGEEFDLQF

SEQ ID NO: 35224 - protein, 11 aa, Artificial Sequence
  Peptide Derived from Human Papillomavirus
HGEEFDLQFIF

SEQ ID NO: 35225 - protein, 8 aa, Artificial Sequence
  Peptide Derived from Human Papillomavirus
IANSDTTF

SEQ ID NO: 35226 - protein, 9 aa, Artificial Sequence
  Peptide Derived from Human Papillomavirus
IANSDTTFK

SEQ ID NO: 35227 - protein, 9 aa, Artificial Sequence
  Peptide Derived from Human Papillomavirus
ICKYPDYLK

SEQ ID NO: 35228 - protein, 8 aa, Artificial Sequence
  Peptide Derived from Human Papillomavirus
ICNSICKY

SEQ ID NO: 35229 - protein, 11 aa, Artificial Sequence
  Peptide Derived from Human Papillomavirus
ICNSICKYPDY

SEQ ID NO: 35230 - protein, 8 aa, Artificial Sequence
  Peptide Derived from Human Papillomavirus
ICWGNQLF

SEQ ID NO: 35231 - protein, 10 aa, Artificial Sequence
  Peptide Derived from Human Papillomavirus
IFNKPYWMQR

SEQ ID NO: 35232 - protein, 11 aa, Artificial Sequence
  Peptide Derived from Human Papillomavirus
IFNKPYWMQRA

SEQ ID NO: 35233 - protein, 11 aa, Artificial Sequence
  Peptide Derived from Human Papillomavirus
IFQLCKITLSA

SEQ ID NO: 35234 - protein, 11 aa, Artificial Sequence
  Peptide Derived from Human Papillomavirus
IMTYIHSMNPA

SEQ ID NO: 35235 - protein, 9 aa, Artificial Sequence
  Peptide Derived from Human Papillomavirus
ISGHPLLNK

SEQ ID NO: 35236 - protein, 10 aa, Artificial Sequence
  Peptide Derived from Human Papillomavirus
ISGHPLLNKF

SEQ ID NO: 35237 - protein, 10 aa, Artificial Sequence
  Peptide Derived from Human Papillomavirus
ITCQKTAPQK

SEQ ID NO: 35238 - protein, 10 aa, Artificial Sequence
  Peptide Derived from Human Papillomavirus
ITLSADIMTY

SEQ ID NO: 35239 - protein, 11 aa, Artificial Sequence
  Peptide Derived from Human Papillomavirus
IVVPKVSGLQY

SEQ ID NO: 35240 - protein, 10 aa, Artificial Sequence
  Peptide Derived from Human Papillomavirus
KAGKRSAPSA

SEQ ID NO: 35241 - protein, 11 aa, Artificial Sequence
  Peptide Derived from Human Papillomavirus
KDYVFWEVNLK

SEQ ID NO: 35242 - protein, 10 aa, Artificial Sequence
  Peptide Derived from Human Papillomavirus
KFDDTENSNR

SEQ ID NO: 35243 - protein, 11 aa, Artificial Sequence
  Peptide Derived from Human Papillomavirus
KFDDTENSNRY

SEQ ID NO: 35244 - protein, 9 aa, Artificial Sequence
  Peptide Derived from Human Papillomavirus
KFGFPDTSF

SEQ ID NO: 35245 - protein, 10 aa, Artificial Sequence
  Peptide Derived from Human Papillomavirus
KFGFPDTSFY

SEQ ID NO: 35246 - protein, 9 aa, Artificial Sequence
  Peptide Derived from Human Papillomavirus
KFKAGKRSA

SEQ ID NO: 35247 - protein, 8 aa, Artificial Sequence
  Peptide Derived from Human Papillomavirus
KFLLQAGY

SEQ ID NO: 35248 - protein, 9 aa, Artificial Sequence
  Peptide Derived from Human Papillomavirus
KFLLQAGYR

SEQ ID NO: 35249 - protein, 10 aa, Artificial Sequence
  Peptide Derived from Human Papillomavirus
KFLLQAGYRA

SEQ ID NO: 35250 - protein, 11 aa, Artificial Sequence
  Peptide Derived from Human Papillomavirus
KFLLQAGYRAR

SEQ ID NO: 35251 - protein, 9 aa, Artificial Sequence
  Peptide Derived from Human Papillomavirus
KFSADLDQF

SEQ ID NO: 35252 - protein, 10 aa, Artificial Sequence
  Peptide Derived from Human Papillomavirus
KGSGSTATLA

SEQ ID NO: 35253 - protein, 9 aa, Artificial Sequence
  Peptide Derived from Human Papillomavirus
KGSPCSNNA

SEQ ID NO: 35254 - protein, 11 aa, Artificial Sequence
  Peptide Derived from Human Papillomavirus
KITLSADIMTY

SEQ ID NO: 35255 - protein, 8 aa, Artificial Sequence
  Peptide Derived from Human Papillomavirus
KSSNFKEY

SEQ ID NO: 35256 - protein, 10 aa, Artificial Sequence
  Peptide Derived from Human Papillomavirus
KSSNFKEYLR

SEQ ID NO: 35257 - protein, 11 aa, Artificial Sequence
  Peptide Derived from Human Papillomavirus
KSSNFKEYLRH

SEQ ID NO: 35258 - protein, 8 aa, Artificial Sequence
  Peptide Derived from Human Papillomavirus
KTAPQKPK

SEQ ID NO: 35259 - protein, 8 aa, Artificial Sequence
  Peptide Derived from Human Papillomavirus
KVSGLQYR

SEQ ID NO: 35260 - protein, 10 aa, Artificial Sequence
  Peptide Derived from Human Papillomavirus
KVSGLQYRVF

SEQ ID NO: 35261 - protein, 11 aa, Artificial Sequence
  Peptide Derived from Human Papillomavirus
KVSGLQYRVFR

SEQ ID NO: 35262 - protein, 8 aa, Artificial Sequence
  Peptide Derived from Human Papillomavirus
KVVSTDEY

SEQ ID NO: 35263 - protein, 11 aa, Artificial Sequence
  Peptide Derived from Human Papillomavirus
KVVSTDEYVTR

SEQ ID NO: 35264 - protein, 8 aa, Artificial Sequence
  Peptide Derived from Human Papillomavirus
LCKITLSA

SEQ ID NO: 35265 - protein, 9 aa, Artificial Sequence
  Peptide Derived from Human Papillomavirus
LDICNSICK

SEQ ID NO: 35266 - protein, 10 aa, Artificial Sequence
  Peptide Derived from Human Papillomavirus
LDICNSICKY

SEQ ID NO: 35267 - protein, 8 aa, Artificial Sequence
  Peptide Derived from Human Papillomavirus
LDQFPLGR

SEQ ID NO: 35268 - protein, 9 aa, Artificial Sequence
  Peptide Derived from Human Papillomavirus
LDQFPLGRK

SEQ ID NO: 35269 - protein, 10 aa, Artificial Sequence
  Peptide Derived from Human Papillomavirus
LDQFPLGRKF

SEQ ID NO: 35270 - protein, 11 aa, Artificial Sequence
  Peptide Derived from Human Papillomavirus
LFFYLRREQMF

SEQ ID NO: 35271 - protein, 10 aa, Artificial Sequence
  Peptide Derived from Human Papillomavirus
LFVTVVDTTR

SEQ ID NO: 35272 - protein, 10 aa, Artificial Sequence
  Peptide Derived from Human Papillomavirus
LGCKPPIGEH

SEQ ID NO: 35273 - protein, 9 aa, Artificial Sequence
  Peptide Derived from Human Papillomavirus
LGRKFLLQA

SEQ ID NO: 35274 - protein, 11 aa, Artificial Sequence
  Peptide Derived from Human Papillomavirus
LGRKFLLQAGY

SEQ ID NO: 35275 - protein, 8 aa, Artificial Sequence
  Peptide Derived from Human Papillomavirus
LGVGISGH

SEQ ID NO: 35276 - protein, 11 aa, Artificial Sequence
  Peptide Derived from Human Papillomavirus
LLGCKPPIGEH

SEQ ID NO: 35277 - protein, 8 aa, Artificial Sequence
  Peptide Derived from Human Papillomavirus
LLQAGYRA

SEQ ID NO: 35278 - protein, 9 aa, Artificial Sequence
  Peptide Derived from Human Papillomavirus
LLQAGYRAR

SEQ ID NO: 35279 - protein, 11 aa, Artificial Sequence
  Peptide Derived from Human Papillomavirus
LLQAGYRARPK

SEQ ID NO: 35280 - protein, 8 aa, Artificial Sequence
  Peptide Derived from Human Papillomavirus
LLTVGHPY

SEQ ID NO: 35281 - protein, 9 aa, Artificial Sequence
  Peptide Derived from Human Papillomavirus
LLTVGHPYY

SEQ ID NO: 35282 - protein, 8 aa, Artificial Sequence
  Peptide Derived from Human Papillomavirus
LSADIMTY

SEQ ID NO: 35283 - protein, 10 aa, Artificial Sequence
  Peptide Derived from Human Papillomavirus
LSADIMTYIH

SEQ ID NO: 35284 - protein, 8 aa, Artificial Sequence
  Peptide Derived from Human Papillomavirus
LTVGHPYY

SEQ ID NO: 35285 - protein, 10 aa, Artificial Sequence
  Peptide Derived from Human Papillomavirus
MDFTALQDTK

SEQ ID NO: 35286 - protein, 9 aa, Artificial Sequence
  Peptide Derived from Human Papillomavirus
MFVRHFFNR

SEQ ID NO: 35287 - protein, 9 aa, Artificial Sequence
  Peptide Derived from Human Papillomavirus
MSLWRPSEA

SEQ ID NO: 35288 - protein, 8 aa, Artificial Sequence
  Peptide Derived from Human Papillomavirus
MSVCAAIA

SEQ ID NO: 35289 - protein, 10 aa, Artificial Sequence
  Peptide Derived from Human Papillomavirus
MTYIHSMNPA

SEQ ID NO: 35290 - protein, 11 aa, Artificial Sequence
  Peptide Derived from Human Papillomavirus
MVAEPYGDTLF

SEQ ID NO: 35291 - protein, 8 aa, Artificial Sequence
  Peptide Derived from Human Papillomavirus
MVDTGFGA

SEQ ID NO: 35292 - protein, 11 aa, Artificial Sequence
  Peptide Derived from Human Papillomavirus
MVDTGFGAMDF

SEQ ID NO: 35293 - protein, 9 aa, Artificial Sequence
  Peptide Derived from Human Papillomavirus
MVTSDAQIF

SEQ ID NO: 35294 - protein, 11 aa, Artificial Sequence
  Peptide Derived from Human Papillomavirus
MVTSDAQIFNK

SEQ ID NO: 35295 - protein, 8 aa, Artificial Sequence
  Peptide Derived from Human Papillomavirus
NFKEYLRH

SEQ ID NO: 35296 - protein, 10 aa, Artificial Sequence
  Peptide Derived from Human Papillomavirus
NGICWGNQLF

SEQ ID NO: 35297 - protein, 9 aa, Artificial Sequence
  Peptide Derived from Human Papillomavirus
NIYYHAGSA

SEQ ID NO: 35298 - protein, 10 aa, Artificial Sequence
  Peptide Derived from Human Papillomavirus
NIYYHAGSAR

SEQ ID NO: 35299 - protein, 8 aa, Artificial Sequence
  Peptide Derived from Human Papillomavirus
NLKEKFSA

SEQ ID NO: 35300 - protein, 9 aa, Artificial Sequence
  Peptide Derived from Human Papillomavirus
NMSVCAAIA

SEQ ID NO: 35301 - protein, 11 aa, Artificial Sequence
  Peptide Derived from Human Papillomavirus
NSDTTFKSSNF

SEQ ID NO: 35302 - protein, 9 aa, Artificial Sequence
  Peptide Derived from Human Papillomavirus
NSICKYPDY

SEQ ID NO: 35303 - protein, 11 aa, Artificial Sequence
  Peptide Derived from Human Papillomavirus
NSICKYPDYLK

SEQ ID NO: 35304 - protein, 9 aa, Artificial Sequence
  Peptide Derived from Human Papillomavirus
PAILEDWNF

SEQ ID NO: 35305 - protein, 8 aa, Artificial Sequence
  Peptide Derived from Human Papillomavirus
PAKRKKTK

SEQ ID NO: 35306 - protein, 9 aa, Artificial Sequence
  Peptide Derived from Human Papillomavirus
PAKRKKTKK

SEQ ID NO: 35307 - protein, 8 aa, Artificial Sequence
  Peptide Derived from Human Papillomavirus
PDPNKFGF

SEQ ID NO: 35308 - protein, 8 aa, Artificial Sequence
  Peptide Derived from Human Papillomavirus
PDYLKMVA

SEQ ID NO: 35309 - protein, 11 aa, Artificial Sequence
  Peptide Derived from Human Papillomavirus
PDYLKMVAEPY

SEQ ID NO: 35310 - protein, 10 aa, Artificial Sequence
  Peptide Derived from Human Papillomavirus
PGDCPPLELK

SEQ ID NO: 35311 - protein, 8 aa, Artificial Sequence
  Peptide Derived from Human Papillomavirus
PIGEHWGK

SEQ ID NO: 35312 - protein, 10 aa, Artificial Sequence
  Peptide Derived from Human Papillomavirus
PLDICNSICK

SEQ ID NO: 35313 - protein, 11 aa, Artificial Sequence
  Peptide Derived from Human Papillomavirus
PLDICNSICKY

SEQ ID NO: 35314 - protein, 10 aa, Artificial Sequence
  Peptide Derived from Human Papillomavirus
PLGRKFLLQA

SEQ ID NO: 35315 - protein, 9 aa, Artificial Sequence
  Peptide Derived from Human Papillomavirus
PLGVGISGH

SEQ ID NO: 35316 - protein, 9 aa, Artificial Sequence
  Peptide Derived from Human Papillomavirus
PSASTTTPA

SEQ ID NO: 35317 - protein, 10 aa, Artificial Sequence
  Peptide Derived from Human Papillomavirus
PSASTTTPAK

SEQ ID NO: 35318 - protein, 11 aa, Artificial Sequence
  Peptide Derived from Human Papillomavirus
PSASTTTPAKR

SEQ ID NO: 35319 - protein, 9 aa, Artificial Sequence
  Peptide Derived from Human Papillomavirus
PSGSLEDTY

SEQ ID NO: 35320 - protein, 10 aa, Artificial Sequence
  Peptide Derived from Human Papillomavirus
PSGSLEDTYR

SEQ ID NO: 35321 - protein, 11 aa, Artificial Sequence
  Peptide Derived from Human Papillomavirus
PSGSLEDTYRF

SEQ ID NO: 35322 - protein, 10 aa, Artificial Sequence
  Peptide Derived from Human Papillomavirus
PSGSMVTSDA

SEQ ID NO: 35323 - protein, 11 aa, Artificial Sequence
  Peptide Derived from Human Papillomavirus
PVSKVVSTDEY

SEQ ID NO: 35324 - protein, 9 aa, Artificial Sequence
  Peptide Derived from Human Papillomavirus
QAGYRARPK

SEQ ID NO: 35325 - protein, 10 aa, Artificial Sequence
  Peptide Derived from Human Papillomavirus
QAGYRARPKF

SEQ ID NO: 35326 - protein, 11 aa, Artificial Sequence
  Peptide Derived from Human Papillomavirus
QAGYRARPKFK

SEQ ID NO: 35327 - protein, 9 aa, Artificial Sequence
  Peptide Derived from Human Papillomavirus
QAITCQKTA

SEQ ID NO: 35328 - protein, 10 aa, Artificial Sequence
  Peptide Derived from Human Papillomavirus
QDGDMVDTGF

SEQ ID NO: 35329 - protein, 8 aa, Artificial Sequence
  Peptide Derived from Human Papillomavirus
QFIFQLCK

SEQ ID NO: 35330 - protein, 8 aa, Artificial Sequence
  Peptide Derived from Human Papillomavirus
QFPLGRKF

SEQ ID NO: 35331 - protein, 11 aa, Artificial Sequence
  Peptide Derived from Human Papillomavirus
QIFNKPYWMQR

SEQ ID NO: 35332 - protein, 9 aa, Artificial Sequence
  Peptide Derived from Human Papillomavirus
QLCKITLSA

SEQ ID NO: 35333 - protein, 8 aa, Artificial Sequence
  Peptide Derived from Human Papillomavirus
QLCLLGCK

SEQ ID NO: 35334 - protein, 11 aa, Artificial Sequence
  Peptide Derived from Human Papillomavirus
QLFVTVVDTTR

SEQ ID NO: 35335 - protein, 8 aa, Artificial Sequence
  Peptide Derived from Human Papillomavirus
QMFVRHFF

SEQ ID NO: 35336 - protein, 10 aa, Artificial Sequence
  Peptide Derived from Human Papillomavirus
QMFVRHFFNR

SEQ ID NO: 35337 - protein, 10 aa, Artificial Sequence
  Peptide Derived from Human Papillomavirus
QTQLCLLGCK

SEQ ID NO: 35338 - protein, 8 aa, Artificial Sequence
  Peptide Derived from Human Papillomavirus
RARPKFKA

SEQ ID NO: 35339 - protein, 10 aa, Artificial Sequence
  Peptide Derived from Human Papillomavirus
RARPKFKAGK

SEQ ID NO: 35340 - protein, 11 aa, Artificial Sequence
  Peptide Derived from Human Papillomavirus
RARPKFKAGKR

SEQ ID NO: 35341 - protein, 9 aa, Artificial Sequence
  Peptide Derived from Human Papillomavirus
RLLTVGHPY

SEQ ID NO: 35342 - protein, 10 aa, Artificial Sequence
  Peptide Derived from Human Papillomavirus
RLLTVGHPYY

SEQ ID NO: 35343 - protein, 8 aa, Artificial Sequence
  Peptide Derived from Human Papillomavirus
RLPDPNKF

SEQ ID NO: 35344 - protein, 10 aa, Artificial Sequence
  Peptide Derived from Human Papillomavirus
RLPDPNKFGF

SEQ ID NO: 35345 - protein, 9 aa, Artificial Sequence
  Peptide Derived from Human Papillomavirus
RSTNMSVCA

SEQ ID NO: 35346 - protein, 10 aa, Artificial Sequence
  Peptide Derived from Human Papillomavirus
RSTNMSVCAA

SEQ ID NO: 35347 - protein, 8 aa, Artificial Sequence
  Peptide Derived from Human Papillomavirus
RTNIYYHA

SEQ ID NO: 35348 - protein, 11 aa, Artificial Sequence
  Peptide Derived from Human Papillomavirus
RTNIYYHAGSA

SEQ ID NO: 35349 - protein, 9 aa, Artificial Sequence
  Peptide Derived from Human Papillomavirus
RVRLPDPNK

SEQ ID NO: 35350 - protein, 10 aa, Artificial Sequence
  Peptide Derived from Human Papillomavirus
RVRLPDPNKF

SEQ ID NO: 35351 - protein, 9 aa, Artificial Sequence
  Peptide Derived from Human Papillomavirus
SADIMTYIH

SEQ ID NO: 35352 - protein, 11 aa, Artificial Sequence
  Peptide Derived from Human Papillomavirus
SADLDQFPLGR

SEQ ID NO: 35353 - protein, 11 aa, Artificial Sequence
  Peptide Derived from Human Papillomavirus
SAPSASTTTPA

SEQ ID NO: 35354 - protein, 9 aa, Artificial Sequence
  Peptide Derived from Human Papillomavirus
SARLLTVGH

SEQ ID NO: 35355 - protein, 11 aa, Artificial Sequence
  Peptide Derived from Human Papillomavirus
SARLLTVGHPY

SEQ ID NO: 35356 - protein, 8 aa, Artificial Sequence
  Peptide Derived from Human Papillomavirus
SASTTTPA

SEQ ID NO: 35357 - protein, 9 aa, Artificial Sequence
  Peptide Derived from Human Papillomavirus
SASTTTPAK

SEQ ID NO: 35358 - protein, 10 aa, Artificial Sequence
  Peptide Derived from Human Papillomavirus
SASTTTPAKR

SEQ ID NO: 35359 - protein, 11 aa, Artificial Sequence
  Peptide Derived from Human Papillomavirus
SASTTTPAKRK

SEQ ID NO: 35360 - protein, 8 aa, Artificial Sequence
  Peptide Derived from Human Papillomavirus
SDAQIFNK

SEQ ID NO: 35361 - protein, 10 aa, Artificial Sequence
  Peptide Derived from Human Papillomavirus
SDAQIFNKPY

SEQ ID NO: 35362 - protein, 11 aa, Artificial Sequence
  Peptide Derived from Human Papillomavirus
SDNPKKIVVPK

SEQ ID NO: 35363 - protein, 10 aa, Artificial Sequence
  Peptide Derived from Human Papillomavirus
SDTTFKSSNF

SEQ ID NO: 35364 - protein, 11 aa, Artificial Sequence
  Peptide Derived from Human Papillomavirus
SDTTFKSSNFK

SEQ ID NO: 35365 - protein, 9 aa, Artificial Sequence
  Peptide Derived from Human Papillomavirus
SFYNPETQR

SEQ ID NO: 35366 - protein, 8 aa, Artificial Sequence
  Peptide Derived from Human Papillomavirus
SGHPLLNK

SEQ ID NO: 35367 - protein, 9 aa, Artificial Sequence
  Peptide Derived from Human Papillomavirus
SGHPLLNKF

SEQ ID NO: 35368 - protein, 8 aa, Artificial Sequence
  Peptide Derived from Human Papillomavirus
SGLQYRVF

SEQ ID NO: 35369 - protein, 9 aa, Artificial Sequence
  Peptide Derived from Human Papillomavirus
SGLQYRVFR

SEQ ID NO: 35370 - protein, 11 aa, Artificial Sequence
  Peptide Derived from Human Papillomavirus
SGLQYRVFRVR

SEQ ID NO: 35371 - protein, 8 aa, Artificial Sequence
  Peptide Derived from Human Papillomavirus
SGSLEDTY

SEQ ID NO: 35372 - protein, 9 aa, Artificial Sequence
  Peptide Derived from Human Papillomavirus
SGSLEDTYR

SEQ ID NO: 35373 - protein, 10 aa, Artificial Sequence
  Peptide Derived from Human Papillomavirus
SGSLEDTYRF

SEQ ID NO: 35374 - protein, 9 aa, Artificial Sequence
  Peptide Derived from Human Papillomavirus
SGSMVTSDA

SEQ ID NO: 35375 - protein, 8 aa, Artificial Sequence
  Peptide Derived from Human Papillomavirus
SGSTATLA

SEQ ID NO: 35376 - protein, 8 aa, Artificial Sequence
  Peptide Derived from Human Papillomavirus
SICKYPDY

SEQ ID NO: 35377 - protein, 10 aa, Artificial Sequence
  Peptide Derived from Human Papillomavirus
SICKYPDYLK

SEQ ID NO: 35378 - protein, 9 aa, Artificial Sequence
  Peptide Derived from Human Papillomavirus
SIPKSDNPK

SEQ ID NO: 35379 - protein, 10 aa, Artificial Sequence
  Peptide Derived from Human Papillomavirus
SIPKSDNPKK

SEQ ID NO: 35380 - protein, 8 aa, Artificial Sequence
  Peptide Derived from Human Papillomavirus
SLEDTYRF

SEQ ID NO: 35381 - protein, 8 aa, Artificial Sequence
  Peptide Derived from Human Papillomavirus
SLWRPSEA

SEQ ID NO: 35382 - protein, 11 aa, Artificial Sequence
  Peptide Derived from Human Papillomavirus
SLWRPSEATVY

SEQ ID NO: 35383 - protein, 10 aa, Artificial Sequence
  Peptide Derived from Human Papillomavirus
SMVTSDAQIF

SEQ ID NO: 35384 - protein, 9 aa, Artificial Sequence
  Peptide Derived from Human Papillomavirus
SSNFKEYLR

SEQ ID NO: 35385 - protein, 10 aa, Artificial Sequence
  Peptide Derived from Human Papillomavirus
SSNFKEYLRH

SEQ ID NO: 35386 - protein, 10 aa, Artificial Sequence
  Peptide Derived from Human Papillomavirus
STATLANSTY

SEQ ID NO: 35387 - protein, 11 aa, Artificial Sequence
  Peptide Derived from Human Papillomavirus
STATLANSTYF

SEQ ID NO: 35388 - protein, 8 aa, Artificial Sequence
  Peptide Derived from Human Papillomavirus
STDEYVTR

SEQ ID NO: 35389 - protein, 8 aa, Artificial Sequence
  Peptide Derived from Human Papillomavirus
STNMSVCA

SEQ ID NO: 35390 - protein, 9 aa, Artificial Sequence
  Peptide Derived from Human Papillomavirus
STNMSVCAA

SEQ ID NO: 35391 - protein, 11 aa, Artificial Sequence
  Peptide Derived from Human Papillomavirus
STNMSVCAAIA

SEQ ID NO: 35392 - protein, 8 aa, Artificial Sequence
  Peptide Derived from Human Papillomavirus
STTTPAKR

SEQ ID NO: 35393 - protein, 9 aa, Artificial Sequence
  Peptide Derived from Human Papillomavirus
STTTPAKRK

SEQ ID NO: 35394 - protein, 10 aa, Artificial Sequence
  Peptide Derived from Human Papillomavirus
STTTPAKRKK

SEQ ID NO: 35395 - protein, 9 aa, Artificial Sequence
  Peptide Derived from Human Papillomavirus
SVPTDLYIK

SEQ ID NO: 35396 - protein, 11 aa, Artificial Sequence
  Peptide Derived from Human Papillomavirus
TAPQKPKEDPF

SEQ ID NO: 35397 - protein, 9 aa, Artificial Sequence
  Peptide Derived from Human Papillomavirus
TATLANSTY

SEQ ID NO: 35398 - protein, 10 aa, Artificial Sequence
  Peptide Derived from Human Papillomavirus
TATLANSTYF

SEQ ID NO: 35399 - protein, 9 aa, Artificial Sequence
  Peptide Derived from Human Papillomavirus
TCQKTAPQK

SEQ ID NO: 35400 - protein, 11 aa, Artificial Sequence
  Peptide Derived from Human Papillomavirus
TCQKTAPQKPK

SEQ ID NO: 35401 - protein, 11 aa, Artificial Sequence
  Peptide Derived from Human Papillomavirus
TDEYVTRTNIY

SEQ ID NO: 35402 - protein, 11 aa, Artificial Sequence
  Peptide Derived from Human Papillomavirus
TDNRECISMDY

SEQ ID NO: 35403 - protein, 8 aa, Artificial Sequence
  Peptide Derived from Human Papillomavirus
TFKSSNFK

SEQ ID NO: 35404 - protein, 10 aa, Artificial Sequence
  Peptide Derived from Human Papillomavirus
TFKSSNFKEY

SEQ ID NO: 35405 - protein, 8 aa, Artificial Sequence
  Peptide Derived from Human Papillomavirus
TGFGAMDF

SEQ ID NO: 35406 - protein, 10 aa, Artificial Sequence
  Peptide Derived from Human Papillomavirus
TGFGAMDFTA

SEQ ID NO: 35407 - protein, 8 aa, Artificial Sequence
  Peptide Derived from Human Papillomavirus
TLANSTYF

SEQ ID NO: 35408 - protein, 8 aa, Artificial Sequence
  Peptide Derived from Human Papillomavirus
TLFFYLRR

SEQ ID NO: 35409 - protein, 9 aa, Artificial Sequence
  Peptide Derived from Human Papillomavirus
TLSADIMTY

SEQ ID NO: 35410 - protein, 11 aa, Artificial Sequence
  Peptide Derived from Human Papillomavirus
TLSADIMTYIH

SEQ ID NO: 35411 - protein, 9 aa, Artificial Sequence
  Peptide Derived from Human Papillomavirus
TSDAQIFNK

SEQ ID NO: 35412 - protein, 11 aa, Artificial Sequence
  Peptide Derived from Human Papillomavirus
TSDAQIFNKPY

SEQ ID NO: 35413 - protein, 10 aa, Artificial Sequence
  Peptide Derived from Human Papillomavirus
TSFYNPETQR

SEQ ID NO: 35414 - protein, 9 aa, Artificial Sequence
  Peptide Derived from Human Papillomavirus
TSQAITCQK

SEQ ID NO: 35415 - protein, 11 aa, Artificial Sequence
  Peptide Derived from Human Papillomavirus
TSQAITCQKTA

SEQ ID NO: 35416 - protein, 8 aa, Artificial Sequence
  Peptide Derived from Human Papillomavirus
TTFKSSNF

SEQ ID NO: 35417 - protein, 9 aa, Artificial Sequence
  Peptide Derived from Human Papillomavirus
TTFKSSNFK

SEQ ID NO: 35418 - protein, 11 aa, Artificial Sequence
  Peptide Derived from Human Papillomavirus
TTFKSSNFKEY

SEQ ID NO: 35419 - protein, 8 aa, Artificial Sequence
  Peptide Derived from Human Papillomavirus
TTPAKRKK

SEQ ID NO: 35420 - protein, 10 aa, Artificial Sequence
  Peptide Derived from Human Papillomavirus
TTPAKRKKTK

SEQ ID NO: 35421 - protein, 11 aa, Artificial Sequence
  Peptide Derived from Human Papillomavirus
TTPAKRKKTKK

SEQ ID NO: 35422 - protein, 11 aa, Artificial Sequence
  Peptide Derived from Human Papillomavirus
TTRSTNMSVCA

SEQ ID NO: 35423 - protein, 8 aa, Artificial Sequence
  Peptide Derived from Human Papillomavirus
TTTPAKRK

SEQ ID NO: 35424 - protein, 9 aa, Artificial Sequence
  Peptide Derived from Human Papillomavirus
TTTPAKRKK

SEQ ID NO: 35425 - protein, 11 aa, Artificial Sequence
  Peptide Derived from Human Papillomavirus
TTTPAKRKKTK

SEQ ID NO: 35426 - protein, 11 aa, Artificial Sequence
  Peptide Derived from Human Papillomavirus
TVGESVPTDLY

SEQ ID NO: 35427 - protein, 11 aa, Artificial Sequence
  Peptide Derived from Human Papillomavirus
TVGHPYYSIPK

SEQ ID NO: 35428 - protein, 11 aa, Artificial Sequence
  Peptide Derived from Human Papillomavirus
TVYLPPVPVSK

SEQ ID NO: 35429 - protein, 10 aa, Artificial Sequence
  Peptide Derived from Human Papillomavirus
VAEPYGDTLF

SEQ ID NO: 35430 - protein, 11 aa, Artificial Sequence
  Peptide Derived from Human Papillomavirus
VAEPYGDTLFF

SEQ ID NO: 35431 - protein, 10 aa, Artificial Sequence
  Peptide Derived from Human Papillomavirus
VDTGFGAMDF

SEQ ID NO: 35432 - protein, 11 aa, Artificial Sequence
  Peptide Derived from Human Papillomavirus
VFRVRLPDPNK

SEQ ID NO: 35433 - protein, 8 aa, Artificial Sequence
  Peptide Derived from Human Papillomavirus
VFWEVNLK

SEQ ID NO: 35434 - protein, 10 aa, Artificial Sequence
  Peptide Derived from Human Papillomavirus
VFWEVNLKEK

SEQ ID NO: 35435 - protein, 11 aa, Artificial Sequence
  Peptide Derived from Human Papillomavirus
VFWEVNLKEKF

SEQ ID NO: 35436 - protein, 10 aa, Artificial Sequence
  Peptide Derived from Human Papillomavirus
VGESVPTDLY

SEQ ID NO: 35437 - protein, 10 aa, Artificial Sequence
  Peptide Derived from Human Papillomavirus
VGHPYYSIPK

SEQ ID NO: 35438 - protein, 11 aa, Artificial Sequence
  Peptide Derived from Human Papillomavirus
VGISGHPLLNK

SEQ ID NO: 35439 - protein, 9 aa, Artificial Sequence
  Peptide Derived from Human Papillomavirus
VSGLQYRVF

SEQ ID NO: 35440 - protein, 10 aa, Artificial Sequence
  Peptide Derived from Human Papillomavirus
VSGLQYRVFR

SEQ ID NO: 35441 - protein, 10 aa, Artificial Sequence
  Peptide Derived from Human Papillomavirus
VSKVVSTDEY

SEQ ID NO: 35442 - protein, 9 aa, Artificial Sequence
  Peptide Derived from Human Papillomavirus
VSTDEYVTR

SEQ ID NO: 35443 - protein, 8 aa, Artificial Sequence
  Peptide Derived from Human Papillomavirus
VTRTNIYY

SEQ ID NO: 35444 - protein, 9 aa, Artificial Sequence
  Peptide Derived from Human Papillomavirus
VTRTNIYYH

SEQ ID NO: 35445 - protein, 10 aa, Artificial Sequence
  Peptide Derived from Human Papillomavirus
VTRTNIYYHA

SEQ ID NO: 35446 - protein, 8 aa, Artificial Sequence
  Peptide Derived from Human Papillomavirus
VTSDAQIF

SEQ ID NO: 35447 - protein, 10 aa, Artificial Sequence
  Peptide Derived from Human Papillomavirus
VTSDAQIFNK

SEQ ID NO: 35448 - protein, 10 aa, Artificial Sequence
  Peptide Derived from Human Papillomavirus
VTSQAITCQK

SEQ ID NO: 35449 - protein, 8 aa, Artificial Sequence
  Peptide Derived from Human Papillomavirus
VTVVDTTR

SEQ ID NO: 35450 - protein, 10 aa, Artificial Sequence
  Peptide Derived from Human Papillomavirus
VVPKVSGLQY

SEQ ID NO: 35451 - protein, 11 aa, Artificial Sequence
  Peptide Derived from Human Papillomavirus
VVPKVSGLQYR

SEQ ID NO: 35452 - protein, 10 aa, Artificial Sequence
  Peptide Derived from Human Papillomavirus
VVSTDEYVTR

SEQ ID NO: 35453 - protein, 10 aa, Artificial Sequence
  Peptide Derived from Human Papillomavirus
WACVGLEVGR

SEQ ID NO: 35454 - protein, 11 aa, Artificial Sequence
  Peptide Derived from Human Papillomavirus
WGKGSPCSNNA

SEQ ID NO: 35455 - protein, 8 aa, Artificial Sequence
  Peptide Derived from Human Papillomavirus
WMQRAQGH

SEQ ID NO: 35456 - protein, 10 aa, Artificial Sequence
  Peptide Derived from Human Papillomavirus
YAGGPGTDNR

SEQ ID NO: 35457 - protein, 8 aa, Artificial Sequence
  Peptide Derived from Human Papillomavirus
YGDTLFFY

SEQ ID NO: 35458 - protein, 10 aa, Artificial Sequence
  Peptide Derived from Human Papillomavirus
YGDTLFFYLR

SEQ ID NO: 35459 - protein, 11 aa, Artificial Sequence
  Peptide Derived from Human Papillomavirus
YGDTLFFYLRR

SEQ ID NO: 35460 - protein, 8 aa, Artificial Sequence
  Peptide Derived from Human Papillomavirus
YIHSMNPA

SEQ ID NO: 35461 - protein, 9 aa, Artificial Sequence
  Peptide Derived from Human Papillomavirus
YIKGSGSTA

SEQ ID NO: 35462 - protein, 9 aa, Artificial Sequence
  Peptide Derived from Human Papillomavirus
YLKMVAEPY

SEQ ID NO: 35463 - protein, 9 aa, Artificial Sequence
  Peptide Derived from Human Papillomavirus
YLPPVPVSK

SEQ ID NO: 35464 - protein, 8 aa, Artificial Sequence
  Peptide Derived from Human Papillomavirus
YLRHGEEF

SEQ ID NO: 35465 - protein, 8 aa, Artificial Sequence
  Peptide Derived from Human Papillomavirus
YLRREQMF

SEQ ID NO: 35466 - protein, 10 aa, Artificial Sequence
  Peptide Derived from Human Papillomavirus
YLRREQMFVR

SEQ ID NO: 35467 - protein, 11 aa, Artificial Sequence
  Peptide Derived from Human Papillomavirus
YLRREQMFVRH

SEQ ID NO: 35468 - protein, 10 aa, Artificial Sequence
  Peptide Derived from Human Papillomavirus
YSIPKSDNPK

SEQ ID NO: 35469 - protein, 11 aa, Artificial Sequence
  Peptide Derived from Human Papillomavirus
YSIPKSDNPKK

SEQ ID NO: 35470 - protein, 9 aa, Artificial Sequence
  Peptide Derived from Human Papillomavirus
YVFWEVNLK

SEQ ID NO: 35471 - protein, 11 aa, Artificial Sequence
  Peptide Derived from Human Papillomavirus
YVFWEVNLKEK

SEQ ID NO: 35472 - protein, 8 aa, Artificial Sequence
  Peptide Derived from Human Papillomavirus
YVTRTNIY

SEQ ID NO: 35473 - protein, 9 aa, Artificial Sequence
  Peptide Derived from Human Papillomavirus
YVTRTNIYY

SEQ ID NO: 35474 - protein, 10 aa, Artificial Sequence
  Peptide Derived from Human Papillomavirus
YVTRTNIYYH

SEQ ID NO: 35475 - protein, 11 aa, Artificial Sequence
  Peptide Derived from Human Papillomavirus
YVTRTNIYYHA

SEQ ID NO: 35476 - protein, 11 aa, Artificial Sequence
  Peptide Derived from Human Papillomavirus
ADTDFTVDTPA

SEQ ID NO: 35477 - protein, 11 aa, Artificial Sequence
  Peptide Derived from Human Papillomavirus
AGTCPSDVIPK

SEQ ID NO: 35478 - protein, 11 aa, Artificial Sequence
  Peptide Derived from Human Papillomavirus
AILDVTSVSTH

SEQ ID NO: 35479 - protein, 10 aa, Artificial Sequence
  Peptide Derived from Human Papillomavirus
ALHRPALTSR

SEQ ID NO: 35480 - protein, 11 aa, Artificial Sequence
  Peptide Derived from Human Papillomavirus
ALHRPALTSRR

SEQ ID NO: 35481 - protein, 10 aa, Artificial Sequence
  Peptide Derived from Human Papillomavirus
ALTSRRNTVR

SEQ ID NO: 35482 - protein, 11 aa, Artificial Sequence
  Peptide Derived from Human Papillomavirus
ALTSRRNTVRY

SEQ ID NO: 35483 - protein, 11 aa, Artificial Sequence
  Peptide Derived from Human Papillomavirus
ASATQLYQTCK

SEQ ID NO: 35484 - protein, 10 aa, Artificial Sequence
  Peptide Derived from Human Papillomavirus
ATHNVSPSTA

SEQ ID NO: 35485 - protein, 8 aa, Artificial Sequence
  Peptide Derived from Human Papillomavirus
ATIGARVH

SEQ ID NO: 35486 - protein, 9 aa, Artificial Sequence
  Peptide Derived from Human Papillomavirus
ATIGARVHY

SEQ ID NO: 35487 - protein, 10 aa, Artificial Sequence
  Peptide Derived from Human Papillomavirus
ATIGARVHYY

SEQ ID NO: 35488 - protein, 11 aa, Artificial Sequence
  Peptide Derived from Human Papillomavirus
ATIGARVHYYY

SEQ ID NO: 35489 - protein, 9 aa, Artificial Sequence
  Peptide Derived from Human Papillomavirus
ATQLYQTCK

SEQ ID NO: 35490 - protein, 10 aa, Artificial Sequence
  Peptide Derived from Human Papillomavirus
ATQLYQTCKA

SEQ ID NO: 35491 - protein, 11 aa, Artificial Sequence
  Peptide Derived from Human Papillomavirus
ATQLYQTCKAA

SEQ ID NO: 35492 - protein, 9 aa, Artificial Sequence
  Peptide Derived from Human Papillomavirus
ATTADTTPA

SEQ ID NO: 35493 - protein, 10 aa, Artificial Sequence
  Peptide Derived from Human Papillomavirus
AVQSTSAVSA

SEQ ID NO: 35494 - protein, 11 aa, Artificial Sequence
  Peptide Derived from Human Papillomavirus
AVQSTSAVSAY

SEQ ID NO: 35495 - protein, 9 aa, Artificial Sequence
  Peptide Derived from Human Papillomavirus
DFLDIIALH

SEQ ID NO: 35496 - protein, 10 aa, Artificial Sequence
  Peptide Derived from Human Papillomavirus
DFLDIIALHR

SEQ ID NO: 35497 - protein, 8 aa, Artificial Sequence
  Peptide Derived from Human Papillomavirus
DFTVDTPA

SEQ ID NO: 35498 - protein, 10 aa, Artificial Sequence
  Peptide Derived from Human Papillomavirus
DFTVDTPATH

SEQ ID NO: 35499 - protein, 8 aa, Artificial Sequence
  Peptide Derived from Human Papillomavirus
DFYLHPSY

SEQ ID NO: 35500 - protein, 9 aa, Artificial Sequence
  Peptide Derived from Human Papillomavirus
DFYLHPSYY

SEQ ID NO: 35501 - protein, 8 aa, Artificial Sequence
  Peptide Derived from Human Papillomavirus
DGGDFYLH

SEQ ID NO: 35502 - protein, 11 aa, Artificial Sequence
  Peptide Derived from Human Papillomavirus
DGGDFYLHPSY

SEQ ID NO: 35503 - protein, 8 aa, Artificial Sequence
  Peptide Derived from Human Papillomavirus
DGLYDIYA

SEQ ID NO: 35504 - protein, 11 aa, Artificial Sequence
  Peptide Derived from Human Papillomavirus
DIATTADTTPA

SEQ ID NO: 35505 - protein, 9 aa, Artificial Sequence
  Peptide Derived from Human Papillomavirus
DIIALHRPA

SEQ ID NO: 35506 - protein, 8 aa, Artificial Sequence
  Peptide Derived from Human Papillomavirus
DISSINPA

SEQ ID NO: 35507 - protein, 8 aa, Artificial Sequence
  Peptide Derived from Human Papillomavirus
DIYADTDF

SEQ ID NO: 35508 - protein, 10 aa, Artificial Sequence
  Peptide Derived from Human Papillomavirus
DTDFTVDTPA

SEQ ID NO: 35509 - protein, 10 aa, Artificial Sequence
  Peptide Derived from Human Papillomavirus
DVGAPAPIPH

SEQ ID NO: 35510 - protein, 8 aa, Artificial Sequence
  Peptide Derived from Human Papillomavirus
DVIPKIEH

SEQ ID NO: 35511 - protein, 8 aa, Artificial Sequence
  Peptide Derived from Human Papillomavirus
DVTSVSTH

SEQ ID NO: 35512 - protein, 9 aa, Artificial Sequence
  Peptide Derived from Human Papillomavirus
EMQPLGASA

SEQ ID NO: 35513 - protein, 9 aa, Artificial Sequence
  Peptide Derived from Human Papillomavirus
ESGIVDVGA

SEQ ID NO: 35514 - protein, 11 aa, Artificial Sequence
  Peptide Derived from Human Papillomavirus
ESGIVDVGAPA

SEQ ID NO: 35515 - protein, 10 aa, Artificial Sequence
  Peptide Derived from Human Papillomavirus
ESIEMQPLGA

SEQ ID NO: 35516 - protein, 10 aa, Artificial Sequence
  Peptide Derived from Human Papillomavirus
ESLYFSNTSH

SEQ ID NO: 35517 - protein, 10 aa, Artificial Sequence
  Peptide Derived from Human Papillomavirus
ETVNAEESLY

SEQ ID NO: 35518 - protein, 11 aa, Artificial Sequence
  Peptide Derived from Human Papillomavirus
ETVNAEESLYF

SEQ ID NO: 35519 - protein, 8 aa, Artificial Sequence
  Peptide Derived from Human Papillomavirus
FFTDVSVA

SEQ ID NO: 35520 - protein, 9 aa, Artificial Sequence
  Peptide Derived from Human Papillomavirus
FFTDVSVAA

SEQ ID NO: 35521 - protein, 8 aa, Artificial Sequence
  Peptide Derived from Human Papillomavirus
FLDIIALH

SEQ ID NO: 35522 - protein, 9 aa, Artificial Sequence
  Peptide Derived from Human Papillomavirus
FLDIIALHR

SEQ ID NO: 35523 - protein, 11 aa, Artificial Sequence
  Peptide Derived from Human Papillomavirus
FLDIIALHRPA

SEQ ID NO: 35524 - protein, 11 aa, Artificial Sequence
  Peptide Derived from Human Papillomavirus
FLSAPKQLITY

SEQ ID NO: 35525 - protein, 10 aa, Artificial Sequence
  Peptide Derived from Human Papillomavirus
FSGPDVPIEH

SEQ ID NO: 35526 - protein, 11 aa, Artificial Sequence
  Peptide Derived from Human Papillomavirus
FSGPDVPIEHA

SEQ ID NO: 35527 - protein, 9 aa, Artificial Sequence
  Peptide Derived from Human Papillomavirus
FSNTSHNIA

SEQ ID NO: 35528 - protein, 8 aa, Artificial Sequence
  Peptide Derived from Human Papillomavirus
FTDVSVAA

SEQ ID NO: 35529 - protein, 9 aa, Artificial Sequence
  Peptide Derived from Human Papillomavirus
FTVDTPATH

SEQ ID NO: 35530 - protein, 8 aa, Artificial Sequence
  Peptide Derived from Human Papillomavirus
FVDGGDFY

SEQ ID NO: 35531 - protein, 10 aa, Artificial Sequence
  Peptide Derived from Human Papillomavirus
FVDGGDFYLH

SEQ ID NO: 35532 - protein, 8 aa, Artificial Sequence
  Peptide Derived from Human Papillomavirus
GAPAPIPH

SEQ ID NO: 35533 - protein, 8 aa, Artificial Sequence
  Peptide Derived from Human Papillomavirus
GARVHYYY

SEQ ID NO: 35534 - protein, 9 aa, Artificial Sequence
  Peptide Derived from Human Papillomavirus
GATIGARVH

SEQ ID NO: 35535 - protein, 10 aa, Artificial Sequence
  Peptide Derived from Human Papillomavirus
GATIGARVHY

SEQ ID NO: 35536 - protein, 11 aa, Artificial Sequence
  Peptide Derived from Human Papillomavirus
GATIGARVHYY

SEQ ID NO: 35537 - protein, 9 aa, Artificial Sequence
  Peptide Derived from Human Papillomavirus
GDFYLHPSY

SEQ ID NO: 35538 - protein, 10 aa, Artificial Sequence
  Peptide Derived from Human Papillomavirus
GDFYLHPSYY

SEQ ID NO: 35539 - protein, 8 aa, Artificial Sequence
  Peptide Derived from Human Papillomavirus
GFDIATTA

SEQ ID NO: 35540 - protein, 10 aa, Artificial Sequence
  Peptide Derived from Human Papillomavirus
GGDFYLHPSY

SEQ ID NO: 35541 - protein, 11 aa, Artificial Sequence
  Peptide Derived from Human Papillomavirus
GGDFYLHPSYY

SEQ ID NO: 35542 - protein, 11 aa, Artificial Sequence
  Peptide Derived from Human Papillomavirus
GIGSGSGTGGR

SEQ ID NO: 35543 - protein, 9 aa, Artificial Sequence
  Peptide Derived from Human Papillomavirus
GIVDVGAPA

SEQ ID NO: 35544 - protein, 11 aa, Artificial Sequence
  Peptide Derived from Human Papillomavirus
GLYDIYADTDF

SEQ ID NO: 35545 - protein, 11 aa, Artificial Sequence
  Peptide Derived from Human Papillomavirus
GLYSKATQQVK

SEQ ID NO: 35546 - protein, 9 aa, Artificial Sequence
  Peptide Derived from Human Papillomavirus
GSGSGTGGR

SEQ ID NO: 35547 - protein, 10 aa, Artificial Sequence
  Peptide Derived from Human Papillomavirus
GSGTGGRTGY

SEQ ID NO: 35548 - protein, 10 aa, Artificial Sequence
  Peptide Derived from Human Papillomavirus
GTCPSDVIPK

SEQ ID NO: 35549 - protein, 8 aa, Artificial Sequence
  Peptide Derived from Human Papillomavirus
GTGGRTGY

SEQ ID NO: 35550 - protein, 11 aa, Artificial Sequence
  Peptide Derived from Human Papillomavirus
GVRRPARLGLY

SEQ ID NO: 35551 - protein, 9 aa, Artificial Sequence
  Peptide Derived from Human Papillomavirus
HAPTQVFPF

SEQ ID NO: 35552 - protein, 10 aa, Artificial Sequence
  Peptide Derived from Human Papillomavirus
HTTIADQILR

SEQ ID NO: 35553 - protein, 11 aa, Artificial Sequence
  Peptide Derived from Human Papillomavirus
HTTIADQILRY

SEQ ID NO: 35554 - protein, 8 aa, Artificial Sequence
  Peptide Derived from Human Papillomavirus
IADQILRY

SEQ ID NO: 35555 - protein, 11 aa, Artificial Sequence
  Peptide Derived from Human Papillomavirus
IALHRPALTSR

SEQ ID NO: 35556 - protein, 10 aa, Artificial Sequence
  Peptide Derived from Human Papillomavirus
IATTADTTPA

SEQ ID NO: 35557 - protein, 8 aa, Artificial Sequence
  Peptide Derived from Human Papillomavirus
IDPTFLSA

SEQ ID NO: 35558 - protein, 10 aa, Artificial Sequence
  Peptide Derived from Human Papillomavirus
IDPTFLSAPK

SEQ ID NO: 35559 - protein, 11 aa, Artificial Sequence
  Peptide Derived from Human Papillomavirus
IFSGPDVPIEH

SEQ ID NO: 35560 - protein, 8 aa, Artificial Sequence
  Peptide Derived from Human Papillomavirus
IFVDGGDF

SEQ ID NO: 35561 - protein, 9 aa, Artificial Sequence
  Peptide Derived from Human Papillomavirus
IFVDGGDFY

SEQ ID NO: 35562 - protein, 11 aa, Artificial Sequence
  Peptide Derived from Human Papillomavirus
IFVDGGDFYLH

SEQ ID NO: 35563 - protein, 8 aa, Artificial Sequence
  Peptide Derived from Human Papillomavirus
IGARVHYY

SEQ ID NO: 35564 - protein, 9 aa, Artificial Sequence
  Peptide Derived from Human Papillomavirus
IGARVHYYY

SEQ ID NO: 35565 - protein, 10 aa, Artificial Sequence
  Peptide Derived from Human Papillomavirus
IGSGSGTGGR

SEQ ID NO: 35566 - protein, 8 aa, Artificial Sequence
  Peptide Derived from Human Papillomavirus
IIALHRPA

SEQ ID NO: 35567 - protein, 10 aa, Artificial Sequence
  Peptide Derived from Human Papillomavirus
ILDVTSVSTH

SEQ ID NO: 35568 - protein, 10 aa, Artificial Sequence
  Peptide Derived from Human Papillomavirus
ILRYGSMGVF

SEQ ID NO: 35569 - protein, 11 aa, Artificial Sequence
  Peptide Derived from Human Papillomavirus
ILRYGSMGVFF

SEQ ID NO: 35570 - protein, 11 aa, Artificial Sequence
  Peptide Derived from Human Papillomavirus
ITSSTPIPGVR

SEQ ID NO: 35571 - protein, 8 aa, Artificial Sequence
  Peptide Derived from Human Papillomavirus
ITYENPAY

SEQ ID NO: 35572 - protein, 8 aa, Artificial Sequence
  Peptide Derived from Human Papillomavirus
IVDVGAPA

SEQ ID NO: 35573 - protein, 8 aa, Artificial Sequence
  Peptide Derived from Human Papillomavirus
KIEHTTIA

SEQ ID NO: 35574 - protein, 10 aa, Artificial Sequence
  Peptide Derived from Human Papillomavirus
KVIDPTFLSA

SEQ ID NO: 35575 - protein, 11 aa, Artificial Sequence
  Peptide Derived from Human Papillomavirus
LAPTTPQVSIF

SEQ ID NO: 35576 - protein, 8 aa, Artificial Sequence
  Peptide Derived from Human Papillomavirus
LDIIALHR

SEQ ID NO: 35577 - protein, 10 aa, Artificial Sequence
  Peptide Derived from Human Papillomavirus
LDIIALHRPA

SEQ ID NO: 35578 - protein, 9 aa, Artificial Sequence
  Peptide Derived from Human Papillomavirus
LDVTSVSTH

SEQ ID NO: 35579 - protein, 8 aa, Artificial Sequence
  Peptide Derived from Human Papillomavirus
LGNKQTLR

SEQ ID NO: 35580 - protein, 10 aa, Artificial Sequence
  Peptide Derived from Human Papillomavirus
LGNKQTLRTR

SEQ ID NO: 35581 - protein, 8 aa, Artificial Sequence
  Peptide Derived from Human Papillomavirus
LITYENPA

SEQ ID NO: 35582 - protein, 9 aa, Artificial Sequence
  Peptide Derived from Human Papillomavirus
LITYENPAY

SEQ ID NO: 35583 - protein, 11 aa, Artificial Sequence
  Peptide Derived from Human Papillomavirus
LLLSSSSISTH

SEQ ID NO: 35584 - protein, 10 aa, Artificial Sequence
  Peptide Derived from Human Papillomavirus
LLSSSSISTH

SEQ ID NO: 35585 - protein, 10 aa, Artificial Sequence
  Peptide Derived from Human Papillomavirus
LSAPKQLITY

SEQ ID NO: 35586 - protein, 9 aa, Artificial Sequence
  Peptide Derived from Human Papillomavirus
LSSSSISTH

SEQ ID NO: 35587 - protein, 11 aa, Artificial Sequence
  Peptide Derived from Human Papillomavirus
LSSSSISTHNY

SEQ ID NO: 35588 - protein, 10 aa, Artificial Sequence
  Peptide Derived from Human Papillomavirus
LSTGFDIPIF

SEQ ID NO: 35589 - protein, 11 aa, Artificial Sequence
  Peptide Derived from Human Papillomavirus
LSTRPSTVSEA

SEQ ID NO: 35590 - protein, 9 aa, Artificial Sequence
  Peptide Derived from Human Papillomavirus
LTSRRNTVR

SEQ ID NO: 35591 - protein, 10 aa, Artificial Sequence
  Peptide Derived from Human Papillomavirus
LTSRRNTVRY

SEQ ID NO: 35592 - protein, 8 aa, Artificial Sequence
  Peptide Derived from Human Papillomavirus
MLKRRRKR

SEQ ID NO: 35593 - protein, 11 aa, Artificial Sequence
  Peptide Derived from Human Papillomavirus
MLKRRRKRVSY

SEQ ID NO: 35594 - protein, 8 aa, Artificial Sequence
  Peptide Derived from Human Papillomavirus
NAEESLYF

SEQ ID NO: 35595 - protein, 8 aa, Artificial Sequence
  Peptide Derived from Human Papillomavirus
NDGLYDIY

SEQ ID NO: 35596 - protein, 9 aa, Artificial Sequence
  Peptide Derived from Human Papillomavirus
NDGLYDIYA

SEQ ID NO: 35597 - protein, 8 aa, Artificial Sequence
  Peptide Derived from Human Papillomavirus
NIAPDPDF

SEQ ID NO: 35598 - protein, 10 aa, Artificial Sequence
  Peptide Derived from Human Papillomavirus
NTTVPLSTGF

SEQ ID NO: 35599 - protein, 11 aa, Artificial Sequence
  Peptide Derived from Human Papillomavirus
NTVRYSRLGNK

SEQ ID NO: 35600 - protein, 11 aa, Artificial Sequence
  Peptide Derived from Human Papillomavirus
PALTSRRNTVR

SEQ ID NO: 35601 - protein, 9 aa, Artificial Sequence
  Peptide Derived from Human Papillomavirus
PARLGLYSK

SEQ ID NO: 35602 - protein, 10 aa, Artificial Sequence
  Peptide Derived from Human Papillomavirus
PARLGLYSKA

SEQ ID NO: 35603 - protein, 11 aa, Artificial Sequence
  Peptide Derived from Human Papillomavirus
PATHNVSPSTA

SEQ ID NO: 35604 - protein, 8 aa, Artificial Sequence
  Peptide Derived from Human Papillomavirus
PAYETVNA

SEQ ID NO: 35605 - protein, 8 aa, Artificial Sequence
  Peptide Derived from Human Papillomavirus
PDFLDIIA

SEQ ID NO: 35606 - protein, 10 aa, Artificial Sequence
  Peptide Derived from Human Papillomavirus
PDFLDIIALH

SEQ ID NO: 35607 - protein, 11 aa, Artificial Sequence
  Peptide Derived from Human Papillomavirus
PDFLDIIALHR

SEQ ID NO: 35608 - protein, 10 aa, Artificial Sequence
  Peptide Derived from Human Papillomavirus
PDPDFLDIIA

SEQ ID NO: 35609 - protein, 8 aa, Artificial Sequence
  Peptide Derived from Human Papillomavirus
PDVPIEHA

SEQ ID NO: 35610 - protein, 8 aa, Artificial Sequence
  Peptide Derived from Human Papillomavirus
PGVRRPAR

SEQ ID NO: 35611 - protein, 10 aa, Artificial Sequence
  Peptide Derived from Human Papillomavirus
PIEHAPTQVF

SEQ ID NO: 35612 - protein, 9 aa, Artificial Sequence
  Peptide Derived from Human Papillomavirus
PIPGVRRPA

SEQ ID NO: 35613 - protein, 10 aa, Artificial Sequence
  Peptide Derived from Human Papillomavirus
PIPGVRRPAR

SEQ ID NO: 35614 - protein, 11 aa, Artificial Sequence
  Peptide Derived from Human Papillomavirus
PIPHPPTTSGF

SEQ ID NO: 35615 - protein, 11 aa, Artificial Sequence
  Peptide Derived from Human Papillomavirus
PLSTGFDIPIF

SEQ ID NO: 35616 - protein, 10 aa, Artificial Sequence
  Peptide Derived from Human Papillomavirus
PSDVIPKIEH

SEQ ID NO: 35617 - protein, 10 aa, Artificial Sequence
  Peptide Derived from Human Papillomavirus
PSTAVQSTSA

SEQ ID NO: 35618 - protein, 10 aa, Artificial Sequence
  Peptide Derived from Human Papillomavirus
PSVLQPPTPA

SEQ ID NO: 35619 - protein, 8 aa, Artificial Sequence
  Peptide Derived from Human Papillomavirus
PSYYMLKR

SEQ ID NO: 35620 - protein, 9 aa, Artificial Sequence
  Peptide Derived from Human Papillomavirus
PSYYMLKRR

SEQ ID NO: 35621 - protein, 10 aa, Artificial Sequence
  Peptide Derived from Human Papillomavirus
PSYYMLKRRR

SEQ ID NO: 35622 - protein, 11 aa, Artificial Sequence
  Peptide Derived from Human Papillomavirus
PSYYMLKRRRK

SEQ ID NO: 35623 - protein, 8 aa, Artificial Sequence
  Peptide Derived from Human Papillomavirus
PTFLSAPK

SEQ ID NO: 35624 - protein, 9 aa, Artificial Sequence
  Peptide Derived from Human Papillomavirus
PTPAETSGH

SEQ ID NO: 35625 - protein, 10 aa, Artificial Sequence
  Peptide Derived from Human Papillomavirus
PTQVFPFPLA

SEQ ID NO: 35626 - protein, 9 aa, Artificial Sequence
  Peptide Derived from Human Papillomavirus
PTTPQVSIF

SEQ ID NO: 35627 - protein, 9 aa, Artificial Sequence
  Peptide Derived from Human Papillomavirus
PTTSGFDIA

SEQ ID NO: 35628 - protein, 11 aa, Artificial Sequence
  Peptide Derived from Human Papillomavirus
QILRYGSMGVF

SEQ ID NO: 35629 - protein, 9 aa, Artificial Sequence
  Peptide Derived from Human Papillomavirus
QLITYENPA

SEQ ID NO: 35630 - protein, 10 aa, Artificial Sequence
  Peptide Derived from Human Papillomavirus
QLITYENPAY

SEQ ID NO: 35631 - protein, 8 aa, Artificial Sequence
  Peptide Derived from Human Papillomavirus
QLYQTCKA

SEQ ID NO: 35632 - protein, 9 aa, Artificial Sequence
  Peptide Derived from Human Papillomavirus
QLYQTCKAA

SEQ ID NO: 35633 - protein, 8 aa, Artificial Sequence
  Peptide Derived from Human Papillomavirus
QSTSAVSA

SEQ ID NO: 35634 - protein, 9 aa, Artificial Sequence
  Peptide Derived from Human Papillomavirus
QSTSAVSAY

SEQ ID NO: 35635 - protein, 9 aa, Artificial Sequence
  Peptide Derived from Human Papillomavirus
QTLRTRSGA

SEQ ID NO: 35636 - protein, 8 aa, Artificial Sequence
  Peptide Derived from Human Papillomavirus
QVFPFPLA

SEQ ID NO: 35637 - protein, 9 aa, Artificial Sequence
  Peptide Derived from Human Papillomavirus
QVKVIDPTF

SEQ ID NO: 35638 - protein, 11 aa, Artificial Sequence
  Peptide Derived from Human Papillomavirus
QVSIFVDGGDF

SEQ ID NO: 35639 - protein, 8 aa, Artificial Sequence
  Peptide Derived from Human Papillomavirus
RASATQLY

SEQ ID NO: 35640 - protein, 8 aa, Artificial Sequence
  Peptide Derived from Human Papillomavirus
RLGLYSKA

SEQ ID NO: 35641 - protein, 9 aa, Artificial Sequence
  Peptide Derived from Human Papillomavirus
RLGNKQTLR

SEQ ID NO: 35642 - protein, 11 aa, Artificial Sequence
  Peptide Derived from Human Papillomavirus
RLGNKQTLRTR

SEQ ID NO: 35643 - protein, 8 aa, Artificial Sequence
  Peptide Derived from Human Papillomavirus
RSGATIGA

SEQ ID NO: 35644 - protein, 9 aa, Artificial Sequence
  Peptide Derived from Human Papillomavirus
RSGATIGAR

SEQ ID NO: 35645 - protein, 11 aa, Artificial Sequence
  Peptide Derived from Human Papillomavirus
RSGATIGARVH

SEQ ID NO: 35646 - protein, 8 aa, Artificial Sequence
  Peptide Derived from Human Papillomavirus
RSKRSTKR

SEQ ID NO: 35647 - protein, 10 aa, Artificial Sequence
  Peptide Derived from Human Papillomavirus
RSKRSTKRTK

SEQ ID NO: 35648 - protein, 11 aa, Artificial Sequence
  Peptide Derived from Human Papillomavirus
RSKRSTKRTKR

SEQ ID NO: 35649 - protein, 8 aa, Artificial Sequence
  Peptide Derived from Human Papillomavirus
RSTKRTKR

SEQ ID NO: 35650 - protein, 9 aa, Artificial Sequence
  Peptide Derived from Human Papillomavirus
RSTKRTKRA

SEQ ID NO: 35651 - protein, 11 aa, Artificial Sequence
  Peptide Derived from Human Papillomavirus
RSTKRTKRASA

SEQ ID NO: 35652 - protein, 10 aa, Artificial Sequence
  Peptide Derived from Human Papillomavirus
RTGYVPLSTR

SEQ ID NO: 35653 - protein, 11 aa, Artificial Sequence
  Peptide Derived from Human Papillomavirus
RTKRASATQLY

SEQ ID NO: 35654 - protein, 10 aa, Artificial Sequence
  Peptide Derived from Human Papillomavirus
RTRSGATIGA

SEQ ID NO: 35655 - protein, 11 aa, Artificial Sequence
  Peptide Derived from Human Papillomavirus
RTRSGATIGAR

SEQ ID NO: 35656 - protein, 9 aa, Artificial Sequence
  Peptide Derived from Human Papillomavirus
SAPKQLITY

SEQ ID NO: 35657 - protein, 10 aa, Artificial Sequence
  Peptide Derived from Human Papillomavirus
SATQLYQTCK

SEQ ID NO: 35658 - protein, 11 aa, Artificial Sequence
  Peptide Derived from Human Papillomavirus
SATQLYQTCKA

SEQ ID NO: 35659 - protein, 9 aa, Artificial Sequence
  Peptide Derived from Human Papillomavirus
SDVIPKIEH

SEQ ID NO: 35660 - protein, 8 aa, Artificial Sequence
  Peptide Derived from Human Papillomavirus
SGATIGAR

SEQ ID NO: 35661 - protein, 10 aa, Artificial Sequence
  Peptide Derived from Human Papillomavirus
SGATIGARVH

SEQ ID NO: 35662 - protein, 11 aa, Artificial Sequence
  Peptide Derived from Human Papillomavirus
SGATIGARVHY

SEQ ID NO: 35663 - protein, 9 aa, Artificial Sequence
  Peptide Derived from Human Papillomavirus
SGFDIATTA

SEQ ID NO: 35664 - protein, 8 aa, Artificial Sequence
  Peptide Derived from Human Papillomavirus
SGIVDVGA

SEQ ID NO: 35665 - protein, 10 aa, Artificial Sequence
  Peptide Derived from Human Papillomavirus
SGIVDVGAPA

SEQ ID NO: 35666 - protein, 9 aa, Artificial Sequence
  Peptide Derived from Human Papillomavirus
SGPDVPIEH

SEQ ID NO: 35667 - protein, 10 aa, Artificial Sequence
  Peptide Derived from Human Papillomavirus
SGPDVPIEHA

SEQ ID NO: 35668 - protein, 8 aa, Artificial Sequence
  Peptide Derived from Human Papillomavirus
SGSGTGGR

SEQ ID NO: 35669 - protein, 11 aa, Artificial Sequence
  Peptide Derived from Human Papillomavirus
SGSGTGGRTGY

SEQ ID NO: 35670 - protein, 9 aa, Artificial Sequence
  Peptide Derived from Human Papillomavirus
SGTGGRTGY

SEQ ID NO: 35671 - protein, 9 aa, Artificial Sequence
  Peptide Derived from Human Papillomavirus
SIEMQPLGA

SEQ ID NO: 35672 - protein, 11 aa, Artificial Sequence
  Peptide Derived from Human Papillomavirus
SIEMQPLGASA

SEQ ID NO: 35673 - protein, 9 aa, Artificial Sequence
  Peptide Derived from Human Papillomavirus
SIFVDGGDF

SEQ ID NO: 35674 - protein, 10 aa, Artificial Sequence
  Peptide Derived from Human Papillomavirus
SIFVDGGDFY

SEQ ID NO: 35675 - protein, 9 aa, Artificial Sequence
  Peptide Derived from Human Papillomavirus
SLYFSNTSH

SEQ ID NO: 35676 - protein, 8 aa, Artificial Sequence
  Peptide Derived from Human Papillomavirus
SSISTHNY

SEQ ID NO: 35677 - protein, 9 aa, Artificial Sequence
  Peptide Derived from Human Papillomavirus
SSSISTHNY

SEQ ID NO: 35678 - protein, 8 aa, Artificial Sequence
  Peptide Derived from Human Papillomavirus
SSSSISTH

SEQ ID NO: 35679 - protein, 10 aa, Artificial Sequence
  Peptide Derived from Human Papillomavirus
SSSSISTHNY

SEQ ID NO: 35680 - protein, 9 aa, Artificial Sequence
  Peptide Derived from Human Papillomavirus
SSTPIPGVR

SEQ ID NO: 35681 - protein, 10 aa, Artificial Sequence
  Peptide Derived from Human Papillomavirus
SSTPIPGVRR

SEQ ID NO: 35682 - protein, 9 aa, Artificial Sequence
  Peptide Derived from Human Papillomavirus
STAVQSTSA

SEQ ID NO: 35683 - protein, 9 aa, Artificial Sequence
  Peptide Derived from Human Papillomavirus
STGFDIPIF

SEQ ID NO: 35684 - protein, 8 aa, Artificial Sequence
  Peptide Derived from Human Papillomavirus
STHENPTF

SEQ ID NO: 35685 - protein, 8 aa, Artificial Sequence
  Peptide Derived from Human Papillomavirus
STKRTKRA

SEQ ID NO: 35686 - protein, 10 aa, Artificial Sequence
  Peptide Derived from Human Papillomavirus
STKRTKRASA

SEQ ID NO: 35687 - protein, 8 aa, Artificial Sequence
  Peptide Derived from Human Papillomavirus
STLNDGLY

SEQ ID NO: 35688 - protein, 11 aa, Artificial Sequence
  Peptide Derived from Human Papillomavirus
STLNDGLYDIY

SEQ ID NO: 35689 - protein, 8 aa, Artificial Sequence
  Peptide Derived from Human Papillomavirus
STPIPGVR

SEQ ID NO: 35690 - protein, 9 aa, Artificial Sequence
  Peptide Derived from Human Papillomavirus
STPIPGVRR

SEQ ID NO: 35691 - protein, 11 aa, Artificial Sequence
  Peptide Derived from Human Papillomavirus
STPIPGVRRPA

SEQ ID NO: 35692 - protein, 10 aa, Artificial Sequence
  Peptide Derived from Human Papillomavirus
STRPSTVSEA

SEQ ID NO: 35693 - protein, 8 aa, Artificial Sequence
  Peptide Derived from Human Papillomavirus
STSAVSAY

SEQ ID NO: 35694 - protein, 11 aa, Artificial Sequence
  Peptide Derived from Human Papillomavirus
STVSEASIPIR

SEQ ID NO: 35695 - protein, 9 aa, Artificial Sequence
  Peptide Derived from Human Papillomavirus
SVLQPPTPA

SEQ ID NO: 35696 - protein, 10 aa, Artificial Sequence
  Peptide Derived from Human Papillomavirus
SVSTHENPTF

SEQ ID NO: 35697 - protein, 8 aa, Artificial Sequence
  Peptide Derived from Human Papillomavirus
TAVQSTSA

SEQ ID NO: 35698 - protein, 11 aa, Artificial Sequence
  Peptide Derived from Human Papillomavirus
TAVQSTSAVSA

SEQ ID NO: 35699 - protein, 9 aa, Artificial Sequence
  Peptide Derived from Human Papillomavirus
TCPSDVIPK

SEQ ID NO: 35700 - protein, 9 aa, Artificial Sequence
  Peptide Derived from Human Papillomavirus
TDFTVDTPA

SEQ ID NO: 35701 - protein, 11 aa, Artificial Sequence
  Peptide Derived from Human Papillomavirus
TDFTVDTPATH

SEQ ID NO: 35702 - protein, 8 aa, Artificial Sequence
  Peptide Derived from Human Papillomavirus
TGFDIPIF

SEQ ID NO: 35703 - protein, 9 aa, Artificial Sequence
  Peptide Derived from Human Papillomavirus
TGYVPLSTR

SEQ ID NO: 35704 - protein, 8 aa, Artificial Sequence
  Peptide Derived from Human Papillomavirus
TIADQILR

SEQ ID NO: 35705 - protein, 9 aa, Artificial Sequence
  Peptide Derived from Human Papillomavirus
TIADQILRY

SEQ ID NO: 35706 - protein, 8 aa, Artificial Sequence
  Peptide Derived from Human Papillomavirus
TIGARVHY

SEQ ID NO: 35707 - protein, 9 aa, Artificial Sequence
  Peptide Derived from Human Papillomavirus
TIGARVHYY

SEQ ID NO: 35708 - protein, 10 aa, Artificial Sequence
  Peptide Derived from Human Papillomavirus
TIGARVHYYY

SEQ ID NO: 35709 - protein, 10 aa, Artificial Sequence
  Peptide Derived from Human Papillomavirus
TLNDGLYDIY

SEQ ID NO: 35710 - protein, 11 aa, Artificial Sequence
  Peptide Derived from Human Papillomavirus
TLNDGLYDIYA

SEQ ID NO: 35711 - protein, 8 aa, Artificial Sequence
  Peptide Derived from Human Papillomavirus
TLRTRSGA

SEQ ID NO: 35712 - protein, 10 aa, Artificial Sequence
  Peptide Derived from Human Papillomavirus
TSGFDIATTA

SEQ ID NO: 35713 - protein, 11 aa, Artificial Sequence
  Peptide Derived from Human Papillomavirus
TSHNIAPDPDF

SEQ ID NO: 35714 - protein, 8 aa, Artificial Sequence
  Peptide Derived from Human Papillomavirus
TSRRNTVR

SEQ ID NO: 35715 - protein, 9 aa, Artificial Sequence
  Peptide Derived from Human Papillomavirus
TSRRNTVRY

SEQ ID NO: 35716 - protein, 11 aa, Artificial Sequence
  Peptide Derived from Human Papillomavirus
TSRRNTVRYSR

SEQ ID NO: 35717 - protein, 10 aa, Artificial Sequence
  Peptide Derived from Human Papillomavirus
TSSTPIPGVR

SEQ ID NO: 35718 - protein, 11 aa, Artificial Sequence
  Peptide Derived from Human Papillomavirus
TSSTPIPGVRR

SEQ ID NO: 35719 - protein, 9 aa, Artificial Sequence
  Peptide Derived from Human Papillomavirus
TSTLNDGLY

SEQ ID NO: 35720 - protein, 11 aa, Artificial Sequence
  Peptide Derived from Human Papillomavirus
TSVSTHENPTF

SEQ ID NO: 35721 - protein, 8 aa, Artificial Sequence
  Peptide Derived from Human Papillomavirus
TTADTTPA

SEQ ID NO: 35722 - protein, 9 aa, Artificial Sequence
  Peptide Derived from Human Papillomavirus
TTIADQILR

SEQ ID NO: 35723 - protein, 10 aa, Artificial Sequence
  Peptide Derived from Human Papillomavirus
TTIADQILRY

SEQ ID NO: 35724 - protein, 8 aa, Artificial Sequence
  Peptide Derived from Human Papillomavirus
TTPQVSIF

SEQ ID NO: 35725 - protein, 8 aa, Artificial Sequence
  Peptide Derived from Human Papillomavirus
TTSGFDIA

SEQ ID NO: 35726 - protein, 11 aa, Artificial Sequence
  Peptide Derived from Human Papillomavirus
TTSGFDIATTA

SEQ ID NO: 35727 - protein, 10 aa, Artificial Sequence
  Peptide Derived from Human Papillomavirus
TTSTLNDGLY

SEQ ID NO: 35728 - protein, 11 aa, Artificial Sequence
  Peptide Derived from Human Papillomavirus
TTTSTLNDGLY

SEQ ID NO: 35729 - protein, 9 aa, Artificial Sequence
  Peptide Derived from Human Papillomavirus
TTVPLSTGF

SEQ ID NO: 35730 - protein, 8 aa, Artificial Sequence
  Peptide Derived from Human Papillomavirus
TVDTPATH

SEQ ID NO: 35731 - protein, 9 aa, Artificial Sequence
  Peptide Derived from Human Papillomavirus
TVNAEESLY

SEQ ID NO: 35732 - protein, 10 aa, Artificial Sequence
  Peptide Derived from Human Papillomavirus
TVNAEESLYF

SEQ ID NO: 35733 - protein, 8 aa, Artificial Sequence
  Peptide Derived from Human Papillomavirus
TVPLSTGF

SEQ ID NO: 35734 - protein, 10 aa, Artificial Sequence
  Peptide Derived from Human Papillomavirus
TVRYSRLGNK

SEQ ID NO: 35735 - protein, 10 aa, Artificial Sequence
  Peptide Derived from Human Papillomavirus
TVSEASIPIR

SEQ ID NO: 35736 - protein, 9 aa, Artificial Sequence
  Peptide Derived from Human Papillomavirus
VDGGDFYLH

SEQ ID NO: 35737 - protein, 11 aa, Artificial Sequence
  Peptide Derived from Human Papillomavirus
VDVGAPAPIPH

SEQ ID NO: 35738 - protein, 9 aa, Artificial Sequence
  Peptide Derived from Human Papillomavirus
VGAPAPIPH

SEQ ID NO: 35739 - protein, 9 aa, Artificial Sequence
  Peptide Derived from Human Papillomavirus
VIDPTFLSA

SEQ ID NO: 35740 - protein, 11 aa, Artificial Sequence
  Peptide Derived from Human Papillomavirus
VIDPTFLSAPK

SEQ ID NO: 35741 - protein, 11 aa, Artificial Sequence
  Peptide Derived from Human Papillomavirus
VIPKIEHTTIA

SEQ ID NO: 35742 - protein, 8 aa, Artificial Sequence
  Peptide Derived from Human Papillomavirus
VLQPPTPA

SEQ ID NO: 35743 - protein, 9 aa, Artificial Sequence
  Peptide Derived from Human Papillomavirus
VSEASIPIR

SEQ ID NO: 35744 - protein, 10 aa, Artificial Sequence
  Peptide Derived from Human Papillomavirus
VSIFVDGGDF

SEQ ID NO: 35745 - protein, 11 aa, Artificial Sequence
  Peptide Derived from Human Papillomavirus
VSIFVDGGDFY

SEQ ID NO: 35746 - protein, 9 aa, Artificial Sequence
  Peptide Derived from Human Papillomavirus
VSTHENPTF

SEQ ID NO: 35747 - protein, 11 aa, Artificial Sequence
  Peptide Derived from Human Papillomavirus
VSYFFTDVSVA

SEQ ID NO: 35748 - protein, 9 aa, Artificial Sequence
  Peptide Derived from Human Papillomavirus
YDISSINPA

SEQ ID NO: 35749 - protein, 9 aa, Artificial Sequence
  Peptide Derived from Human Papillomavirus
YDIYADTDF

SEQ ID NO: 35750 - protein, 9 aa, Artificial Sequence
  Peptide Derived from Human Papillomavirus
YFFTDVSVA

SEQ ID NO: 35751 - protein, 10 aa, Artificial Sequence
  Peptide Derived from Human Papillomavirus
YFFTDVSVAA

SEQ ID NO: 35752 - protein, 10 aa, Artificial Sequence
  Peptide Derived from Human Papillomavirus
YFSNTSHNIA

SEQ ID NO: 35753 - protein, 8 aa, Artificial Sequence
  Peptide Derived from Human Papillomavirus
YGSMGVFF

SEQ ID NO: 35754 - protein, 10 aa, Artificial Sequence
  Peptide Derived from Human Papillomavirus
YLHPSYYMLK

SEQ ID NO: 35755 - protein, 11 aa, Artificial Sequence
  Peptide Derived from Human Papillomavirus
YLHPSYYMLKR

SEQ ID NO: 35756 - protein, 8 aa, Artificial Sequence
  Peptide Derived from Human Papillomavirus
YMLKRRRK

SEQ ID NO: 35757 - protein, 9 aa, Artificial Sequence
  Peptide Derived from Human Papillomavirus
YMLKRRRKR

SEQ ID NO: 35758 - protein, 9 aa, Artificial Sequence
  Peptide Derived from Human Papillomavirus
YSKATQQVK

SEQ ID NO: 35759 - protein, 11 aa, Artificial Sequence
  Peptide Derived from Human Papillomavirus
YSRLGNKQTLR

SEQ ID NO: 35760 - protein, 11 aa, Artificial Sequence
  Peptide Derived from Human Papillomavirus
AAAFLKSNSQA

SEQ ID NO: 35761 - protein, 8 aa, Artificial Sequence
  Peptide Derived from Human Papillomavirus
AACSQSAA

SEQ ID NO: 35762 - protein, 8 aa, Artificial Sequence
  Peptide Derived from Human Papillomavirus
AAEDVVDR

SEQ ID NO: 35763 - protein, 9 aa, Artificial Sequence
  Peptide Derived from Human Papillomavirus
AAEDVVDRA

SEQ ID NO: 35764 - protein, 10 aa, Artificial Sequence
  Peptide Derived from Human Papillomavirus
AAEDVVDRAA

SEQ ID NO: 35765 - protein, 10 aa, Artificial Sequence
  Peptide Derived from Human Papillomavirus
AAFLKSNSQA

SEQ ID NO: 35766 - protein, 11 aa, Artificial Sequence
  Peptide Derived from Human Papillomavirus
AAFLKSNSQAK

SEQ ID NO: 35767 - protein, 11 aa, Artificial Sequence
  Peptide Derived from Human Papillomavirus
AANPCRTSINK

SEQ ID NO: 35768 - protein, 11 aa, Artificial Sequence
  Peptide Derived from Human Papillomavirus
ADDSGTDLLEF

SEQ ID NO: 35769 - protein, 9 aa, Artificial Sequence
  Peptide Derived from Human Papillomavirus
ADPEGTNGA

SEQ ID NO: 35770 - protein, 8 aa, Artificial Sequence
  Peptide Derived from Human Papillomavirus
ADSNSNAA

SEQ ID NO: 35771 - protein, 9 aa, Artificial Sequence
  Peptide Derived from Human Papillomavirus
ADSNSNAAA

SEQ ID NO: 35772 - protein, 10 aa, Artificial Sequence
  Peptide Derived from Human Papillomavirus
ADSNSNAAAF

SEQ ID NO: 35773 - protein, 8 aa, Artificial Sequence
  Peptide Derived from Human Papillomavirus
ADTEAARA

SEQ ID NO: 35774 - protein, 10 aa, Artificial Sequence
  Peptide Derived from Human Papillomavirus
ADTEAARALF

SEQ ID NO: 35775 - protein, 11 aa, Artificial Sequence
  Peptide Derived from Human Papillomavirus
AFKKFLKGIPK

SEQ ID NO: 35776 - protein, 8 aa, Artificial Sequence
  Peptide Derived from Human Papillomavirus
AFLGAFKK

SEQ ID NO: 35777 - protein, 9 aa, Artificial Sequence
  Peptide Derived from Human Papillomavirus
AFLGAFKKF

SEQ ID NO: 35778 - protein, 11 aa, Artificial Sequence
  Peptide Derived from Human Papillomavirus
AFLGAFKKFLK

SEQ ID NO: 35779 - protein, 9 aa, Artificial Sequence
  Peptide Derived from Human Papillomavirus
AFLKSNSQA

SEQ ID NO: 35780 - protein, 10 aa, Artificial Sequence
  Peptide Derived from Human Papillomavirus
AFLKSNSQAK

SEQ ID NO: 35781 - protein, 9 aa, Artificial Sequence
  Peptide Derived from Human Papillomavirus
AGENTRSLR

SEQ ID NO: 35782 - protein, 9 aa, Artificial Sequence
  Peptide Derived from Human Papillomavirus
AGMGCTGWF

SEQ ID NO: 35783 - protein, 9 aa, Artificial Sequence
  Peptide Derived from Human Papillomavirus
AGTDSRWPY

SEQ ID NO: 35784 - protein, 11 aa, Artificial Sequence
  Peptide Derived from Human Papillomavirus
AGTDSRWPYLH

SEQ ID NO: 35785 - protein, 8 aa, Artificial Sequence
  Peptide Derived from Human Papillomavirus
AINDENWK

SEQ ID NO: 35786 - protein, 10 aa, Artificial Sequence
  Peptide Derived from Human Papillomavirus
AINDENWKSF

SEQ ID NO: 35787 - protein, 11 aa, Artificial Sequence
  Peptide Derived from Human Papillomavirus
AINDENWKSFF

SEQ ID NO: 35788 - protein, 8 aa, Artificial Sequence
  Peptide Derived from Human Papillomavirus
ALKRKFAA

SEQ ID NO: 35789 - protein, 8 aa, Artificial Sequence
  Peptide Derived from Human Papillomavirus
ALYWFRTA

SEQ ID NO: 35790 - protein, 8 aa, Artificial Sequence
  Peptide Derived from Human Papillomavirus
AVCALKRK

SEQ ID NO: 35791 - protein, 9 aa, Artificial Sequence
  Peptide Derived from Human Papillomavirus
AVCALKRKF

SEQ ID NO: 35792 - protein, 10 aa, Artificial Sequence
  Peptide Derived from Human Papillomavirus
AVCALKRKFA

SEQ ID NO: 35793 - protein, 11 aa, Artificial Sequence
  Peptide Derived from Human Papillomavirus
AVCALKRKFAA

SEQ ID NO: 35794 - protein, 8 aa, Artificial Sequence
  Peptide Derived from Human Papillomavirus
CALKRKFA

SEQ ID NO: 35795 - protein, 9 aa, Artificial Sequence
  Peptide Derived from Human Papillomavirus
CALKRKFAA

SEQ ID NO: 35796 - protein, 9 aa, Artificial Sequence
  Peptide Derived from Human Papillomavirus
CALYWFRTA

SEQ ID NO: 35797 - protein, 8 aa, Artificial Sequence
  Peptide Derived from Human Papillomavirus
CGIMCRHY

SEQ ID NO: 35798 - protein, 9 aa, Artificial Sequence
  Peptide Derived from Human Papillomavirus
CGIMCRHYK

SEQ ID NO: 35799 - protein, 10 aa, Artificial Sequence
  Peptide Derived from Human Papillomavirus
CGIMCRHYKK

SEQ ID NO: 35800 - protein, 11 aa, Artificial Sequence
  Peptide Derived from Human Papillomavirus
CGIMCRHYKKA

SEQ ID NO: 35801 - protein, 8 aa, Artificial Sequence
  Peptide Derived from Human Papillomavirus
CGPANTGK

SEQ ID NO: 35802 - protein, 10 aa, Artificial Sequence
  Peptide Derived from Human Papillomavirus
CGPANTGKSY

SEQ ID NO: 35803 - protein, 11 aa, Artificial Sequence
  Peptide Derived from Human Papillomavirus
CGPANTGKSYF

SEQ ID NO: 35804 - protein, 8 aa, Artificial Sequence
  Peptide Derived from Human Papillomavirus
CMLICGPA

SEQ ID NO: 35805 - protein, 8 aa, Artificial Sequence
  Peptide Derived from Human Papillomavirus
CMVIEPPK

SEQ ID NO: 35806 - protein, 10 aa, Artificial Sequence
  Peptide Derived from Human Papillomavirus
CMVIEPPKLR

SEQ ID NO: 35807 - protein, 8 aa, Artificial Sequence
  Peptide Derived from Human Papillomavirus
CSAGENTR

SEQ ID NO: 35808 - protein, 11 aa, Artificial Sequence
  Peptide Derived from Human Papillomavirus
CSAGENTRSLR

SEQ ID NO: 35809 - protein, 9 aa, Artificial Sequence
  Peptide Derived from Human Papillomavirus
CSKNRLTVA

SEQ ID NO: 35810 - protein, 10 aa, Artificial Sequence
  Peptide Derived from Human Papillomavirus
CSKNRLTVAK

SEQ ID NO: 35811 - protein, 9 aa, Artificial Sequence
  Peptide Derived from Human Papillomavirus
CTDWCITGY

SEQ ID NO: 35812 - protein, 9 aa, Artificial Sequence
  Peptide Derived from Human Papillomavirus
CTGWFEVEA

SEQ ID NO: 35813 - protein, 9 aa, Artificial Sequence
  Peptide Derived from Human Papillomavirus
CVISCVNSK

SEQ ID NO: 35814 - protein, 11 aa, Artificial Sequence
  Peptide Derived from Human Papillomavirus
CVISCVNSKSH

SEQ ID NO: 35815 - protein, 8 aa, Artificial Sequence
  Peptide Derived from Human Papillomavirus
CVNSKSHF

SEQ ID NO: 35816 - protein, 8 aa, Artificial Sequence
  Peptide Derived from Human Papillomavirus
DCGIMCRH

SEQ ID NO: 35817 - protein, 9 aa, Artificial Sequence
  Peptide Derived from Human Papillomavirus
DCGIMCRHY

SEQ ID NO: 35818 - protein, 10 aa, Artificial Sequence
  Peptide Derived from Human Papillomavirus
DCGIMCRHYK

SEQ ID NO: 35819 - protein, 11 aa, Artificial Sequence
  Peptide Derived from Human Papillomavirus
DCGIMCRHYKK

SEQ ID NO: 35820 - protein, 8 aa, Artificial Sequence
  Peptide Derived from Human Papillomavirus
DDLNAVCA

SEQ ID NO: 35821 - protein, 10 aa, Artificial Sequence
  Peptide Derived from Human Papillomavirus
DDLNAVCALK

SEQ ID NO: 35822 - protein, 11 aa, Artificial Sequence
  Peptide Derived from Human Papillomavirus
DDLNAVCALKR

SEQ ID NO: 35823 - protein, 8 aa, Artificial Sequence
  Peptide Derived from Human Papillomavirus
DDSDIAYY

SEQ ID NO: 35824 - protein, 9 aa, Artificial Sequence
  Peptide Derived from Human Papillomavirus
DDSDIAYYY

SEQ ID NO: 35825 - protein, 10 aa, Artificial Sequence
  Peptide Derived from Human Papillomavirus
DDSDIAYYYA

SEQ ID NO: 35826 - protein, 10 aa, Artificial Sequence
  Peptide Derived from Human Papillomavirus
DDSGTDLLEF

SEQ ID NO: 35827 - protein, 10 aa, Artificial Sequence
  Peptide Derived from Human Papillomavirus
DDSMENSIQA

SEQ ID NO: 35828 - protein, 10 aa, Artificial Sequence
  Peptide Derived from Human Papillomavirus
DDVTPISWTY

SEQ ID NO: 35829 - protein, 10 aa, Artificial Sequence
  Peptide Derived from Human Papillomavirus
DGNEISIDVK

SEQ ID NO: 35830 - protein, 11 aa, Artificial Sequence
  Peptide Derived from Human Papillomavirus
DGNEISIDVKH

SEQ ID NO: 35831 - protein, 10 aa, Artificial Sequence
  Peptide Derived from Human Papillomavirus
DIAYYYAQLA

SEQ ID NO: 35832 - protein, 8 aa, Artificial Sequence
  Peptide Derived from Human Papillomavirus
DLIEEEDK

SEQ ID NO: 35833 - protein, 11 aa, Artificial Sequence
  Peptide Derived from Human Papillomavirus
DLIEEEDKENH

SEQ ID NO: 35834 - protein, 9 aa, Artificial Sequence
  Peptide Derived from Human Papillomavirus
DLNAVCALK

SEQ ID NO: 35835 - protein, 10 aa, Artificial Sequence
  Peptide Derived from Human Papillomavirus
DLNAVCALKR

SEQ ID NO: 35836 - protein, 11 aa, Artificial Sequence
  Peptide Derived from Human Papillomavirus
DLNAVCALKRK

SEQ ID NO: 35837 - protein, 9 aa, Artificial Sequence
  Peptide Derived from Human Papillomavirus
DLSEMVQWA

SEQ ID NO: 35838 - protein, 10 aa, Artificial Sequence
  Peptide Derived from Human Papillomavirus
DLSEMVQWAY

SEQ ID NO: 35839 - protein, 8 aa, Artificial Sequence
  Peptide Derived from Human Papillomavirus
DSDIAYYY

SEQ ID NO: 35840 - protein, 9 aa, Artificial Sequence
  Peptide Derived from Human Papillomavirus
DSDIAYYYA

SEQ ID NO: 35841 - protein, 9 aa, Artificial Sequence
  Peptide Derived from Human Papillomavirus
DSGTDLLEF

SEQ ID NO: 35842 - protein, 9 aa, Artificial Sequence
  Peptide Derived from Human Papillomavirus
DSMENSIQA

SEQ ID NO: 35843 - protein, 8 aa, Artificial Sequence
  Peptide Derived from Human Papillomavirus
DSNSNAAA

SEQ ID NO: 35844 - protein, 9 aa, Artificial Sequence
  Peptide Derived from Human Papillomavirus
DSNSNAAAF

SEQ ID NO: 35845 - protein, 11 aa, Artificial Sequence
  Peptide Derived from Human Papillomavirus
DSNSNAAAFLK

SEQ ID NO: 35846 - protein, 8 aa, Artificial Sequence
  Peptide Derived from Human Papillomavirus
DSRWPYLH

SEQ ID NO: 35847 - protein, 10 aa, Artificial Sequence
  Peptide Derived from Human Papillomavirus
DSRWPYLHSR

SEQ ID NO: 35848 - protein, 9 aa, Artificial Sequence
  Peptide Derived from Human Papillomavirus
DTEAARALF

SEQ ID NO: 35849 - protein, 11 aa, Artificial Sequence
  Peptide Derived from Human Papillomavirus
DVKHRALVQLK

SEQ ID NO: 35850 - protein, 9 aa, Artificial Sequence
  Peptide Derived from Human Papillomavirus
DVTPISWTY

SEQ ID NO: 35851 - protein, 11 aa, Artificial Sequence
  Peptide Derived from Human Papillomavirus
DVVDRAANPCR

SEQ ID NO: 35852 - protein, 8 aa, Artificial Sequence
  Peptide Derived from Human Papillomavirus
ECTYRKRK

SEQ ID NO: 35853 - protein, 9 aa, Artificial Sequence
  Peptide Derived from Human Papillomavirus
EDDLNAVCA

SEQ ID NO: 35854 - protein, 11 aa, Artificial Sequence
  Peptide Derived from Human Papillomavirus
EDDLNAVCALK

SEQ ID NO: 35855 - protein, 8 aa, Artificial Sequence
  Peptide Derived from Human Papillomavirus
EDVVDRAA

SEQ ID NO: 35856 - protein, 8 aa, Artificial Sequence
  Peptide Derived from Human Papillomavirus
EFKNPFPF

SEQ ID NO: 35857 - protein, 8 aa, Artificial Sequence
  Peptide Derived from Human Papillomavirus
EFTAFLGA

SEQ ID NO: 35858 - protein, 9 aa, Artificial Sequence
  Peptide Derived from Human Papillomavirus
EFTAFLGAF

SEQ ID NO: 35859 - protein, 10 aa, Artificial Sequence
  Peptide Derived from Human Papillomavirus
EFTAFLGAFK

SEQ ID NO: 35860 - protein, 11 aa, Artificial Sequence
  Peptide Derived from Human Papillomavirus
EFTAFLGAFKK

SEQ ID NO: 35861 - protein, 8 aa, Artificial Sequence
  Peptide Derived from Human Papillomavirus
EGEDDLNA

SEQ ID NO: 35862 - protein, 11 aa, Artificial Sequence
  Peptide Derived from Human Papillomavirus
EGEDDLNAVCA

SEQ ID NO: 35863 - protein, 8 aa, Artificial Sequence
  Peptide Derived from Human Papillomavirus
EISIDVKH

SEQ ID NO: 35864 - protein, 9 aa, Artificial Sequence
  Peptide Derived from Human Papillomavirus
EISIDVKHR

SEQ ID NO: 35865 - protein, 10 aa, Artificial Sequence
  Peptide Derived from Human Papillomavirus
EISIDVKHRA

SEQ ID NO: 35866 - protein, 9 aa, Artificial Sequence
  Peptide Derived from Human Papillomavirus
ELTDDSDIA

SEQ ID NO: 35867 - protein, 10 aa, Artificial Sequence
  Peptide Derived from Human Papillomavirus
ELTDDSDIAY

SEQ ID NO: 35868 - protein, 11 aa, Artificial Sequence
  Peptide Derived from Human Papillomavirus
ELTDDSDIAYY

SEQ ID NO: 35869 - protein, 10 aa, Artificial Sequence
  Peptide Derived from Human Papillomavirus
ELVRPFKSDK

SEQ ID NO: 35870 - protein, 8 aa, Artificial Sequence
  Peptide Derived from Human Papillomavirus
ESLKVLIK

SEQ ID NO: 35871 - protein, 10 aa, Artificial Sequence
  Peptide Derived from Human Papillomavirus
ESLKVLIKQH

SEQ ID NO: 35872 - protein, 10 aa, Artificial Sequence
  Peptide Derived from Human Papillomavirus
ETCMVIEPPK

SEQ ID NO: 35873 - protein, 8 aa, Artificial Sequence
  Peptide Derived from Human Papillomavirus
EVEAVIER

SEQ ID NO: 35874 - protein, 9 aa, Artificial Sequence
  Peptide Derived from Human Papillomavirus
EVEAVIERR

SEQ ID NO: 35875 - protein, 8 aa, Artificial Sequence
  Peptide Derived from Human Papillomavirus
FAACSQSA

SEQ ID NO: 35876 - protein, 9 aa, Artificial Sequence
  Peptide Derived from Human Papillomavirus
FAACSQSAA

SEQ ID NO: 35877 - protein, 9 aa, Artificial Sequence
  Peptide Derived from Human Papillomavirus
FDENGNPVY

SEQ ID NO: 35878 - protein, 10 aa, Artificial Sequence
  Peptide Derived from Human Papillomavirus
FDENGNPVYA

SEQ ID NO: 35879 - protein, 10 aa, Artificial Sequence
  Peptide Derived from Human Papillomavirus
FDLSEMVQWA

SEQ ID NO: 35880 - protein, 11 aa, Artificial Sequence
  Peptide Derived from Human Papillomavirus
FDLSEMVQWAY

SEQ ID NO: 35881 - protein, 8 aa, Artificial Sequence
  Peptide Derived from Human Papillomavirus
FFSRTWCK

SEQ ID NO: 35882 - protein, 8 aa, Artificial Sequence
  Peptide Derived from Human Papillomavirus
FGMSLIQF

SEQ ID NO: 35883 - protein, 10 aa, Artificial Sequence
  Peptide Derived from Human Papillomavirus
FGMSLIQFLK

SEQ ID NO: 35884 - protein, 8 aa, Artificial Sequence
  Peptide Derived from Human Papillomavirus
FLGAFKKF

SEQ ID NO: 35885 - protein, 10 aa, Artificial Sequence
  Peptide Derived from Human Papillomavirus
FLGAFKKFLK

SEQ ID NO: 35886 - protein, 8 aa, Artificial Sequence
  Peptide Derived from Human Papillomavirus
FLKGIPKK

SEQ ID NO: 35887 - protein, 8 aa, Artificial Sequence
  Peptide Derived from Human Papillomavirus
FLKSNSQA

SEQ ID NO: 35888 - protein, 9 aa, Artificial Sequence
  Peptide Derived from Human Papillomavirus
FLKSNSQAK

SEQ ID NO: 35889 - protein, 8 aa, Artificial Sequence
  Peptide Derived from Human Papillomavirus
FMELVRPF

SEQ ID NO: 35890 - protein, 9 aa, Artificial Sequence
  Peptide Derived from Human Papillomavirus
FMELVRPFK

SEQ ID NO: 35891 - protein, 8 aa, Artificial Sequence
  Peptide Derived from Human Papillomavirus
FTAFLGAF

SEQ ID NO: 35892 - protein, 9 aa, Artificial Sequence
  Peptide Derived from Human Papillomavirus
FTAFLGAFK

SEQ ID NO: 35893 - protein, 10 aa, Artificial Sequence
  Peptide Derived from Human Papillomavirus
FTAFLGAFKK

SEQ ID NO: 35894 - protein, 11 aa, Artificial Sequence
  Peptide Derived from Human Papillomavirus
FTAFLGAFKKF

SEQ ID NO: 35895 - protein, 8 aa, Artificial Sequence
  Peptide Derived from Human Papillomavirus
GAFKKFLK

SEQ ID NO: 35896 - protein, 10 aa, Artificial Sequence
  Peptide Derived from Human Papillomavirus
GAGMGCTGWF

SEQ ID NO: 35897 - protein, 10 aa, Artificial Sequence
  Peptide Derived from Human Papillomavirus
GCTGWFEVEA

SEQ ID NO: 35898 - protein, 10 aa, Artificial Sequence
  Peptide Derived from Human Papillomavirus
GCVISCVNSK

SEQ ID NO: 35899 - protein, 8 aa, Artificial Sequence
  Peptide Derived from Human Papillomavirus
GGNISTFK

SEQ ID NO: 35900 - protein, 11 aa, Artificial Sequence
  Peptide Derived from Human Papillomavirus
GGNISTFKCSA

SEQ ID NO: 35901 - protein, 9 aa, Artificial Sequence
  Peptide Derived from Human Papillomavirus
GIIILLLIR

SEQ ID NO: 35902 - protein, 10 aa, Artificial Sequence
  Peptide Derived from Human Papillomavirus
GIIILLLIRF

SEQ ID NO: 35903 - protein, 11 aa, Artificial Sequence
  Peptide Derived from Human Papillomavirus
GIIILLLIRFR

SEQ ID NO: 35904 - protein, 8 aa, Artificial Sequence
  Peptide Derived from Human Papillomavirus
GIMCRHYK

SEQ ID NO: 35905 - protein, 9 aa, Artificial Sequence
  Peptide Derived from Human Papillomavirus
GIMCRHYKK

SEQ ID NO: 35906 - protein, 10 aa, Artificial Sequence
  Peptide Derived from Human Papillomavirus
GIMCRHYKKA

SEQ ID NO: 35907 - protein, 9 aa, Artificial Sequence
  Peptide Derived from Human Papillomavirus
GISFMELVR

SEQ ID NO: 35908 - protein, 11 aa, Artificial Sequence
  Peptide Derived from Human Papillomavirus
GISFMELVRPF

SEQ ID NO: 35909 - protein, 11 aa, Artificial Sequence
  Peptide Derived from Human Papillomavirus
GISPSVAESLK

SEQ ID NO: 35910 - protein, 8 aa, Artificial Sequence
  Peptide Derived from Human Papillomavirus
GMGCTGWF

SEQ ID NO: 35911 - protein, 9 aa, Artificial Sequence
  Peptide Derived from Human Papillomavirus
GMSLIQFLK

SEQ ID NO: 35912 - protein, 8 aa, Artificial Sequence
  Peptide Derived from Human Papillomavirus
GTDSRWPY

SEQ ID NO: 35913 - protein, 10 aa, Artificial Sequence
  Peptide Derived from Human Papillomavirus
GTDSRWPYLH

SEQ ID NO: 35914 - protein, 9 aa, Artificial Sequence
  Peptide Derived from Human Papillomavirus
GTTPEWIDR

SEQ ID NO: 35915 - protein, 10 aa, Artificial Sequence
  Peptide Derived from Human Papillomavirus
HFWLQPLSDA

SEQ ID NO: 35916 - protein, 11 aa, Artificial Sequence
  Peptide Derived from Human Papillomavirus
HFWLQPLSDAK

SEQ ID NO: 35917 - protein, 8 aa, Artificial Sequence
  Peptide Derived from Human Papillomavirus
HGGNISTF

SEQ ID NO: 35918 - protein, 9 aa, Artificial Sequence
  Peptide Derived from Human Papillomavirus
HGGNISTFK

SEQ ID NO: 35919 - protein, 9 aa, Artificial Sequence
  Peptide Derived from Human Papillomavirus
HLQCLTCDR

SEQ ID NO: 35920 - protein, 8 aa, Artificial Sequence
  Peptide Derived from Human Papillomavirus
HSFNDNIF

SEQ ID NO: 35921 - protein, 9 aa, Artificial Sequence
  Peptide Derived from Human Papillomavirus
HSRLTVFEF

SEQ ID NO: 35922 - protein, 10 aa, Artificial Sequence
  Peptide Derived from Human Papillomavirus
HSRLTVFEFK

SEQ ID NO: 35923 - protein, 11 aa, Artificial Sequence
  Peptide Derived from Human Papillomavirus
HSSNTKANILY

SEQ ID NO: 35924 - protein, 9 aa, Artificial Sequence
  Peptide Derived from Human Papillomavirus
IAYYYAQLA

SEQ ID NO: 35925 - protein, 9 aa, Artificial Sequence
  Peptide Derived from Human Papillomavirus
ICGPANTGK

SEQ ID NO: 35926 - protein, 11 aa, Artificial Sequence
  Peptide Derived from Human Papillomavirus
ICGPANTGKSY

SEQ ID NO: 35927 - protein, 11 aa, Artificial Sequence
  Peptide Derived from Human Papillomavirus
IDDSMENSIQA

SEQ ID NO: 35928 - protein, 11 aa, Artificial Sequence
  Peptide Derived from Human Papillomavirus
IDDVTPISWTY

SEQ ID NO: 35929 - protein, 8 aa, Artificial Sequence
  Peptide Derived from Human Papillomavirus
IDDYMRNA

SEQ ID NO: 35930 - protein, 9 aa, Artificial Sequence
  Peptide Derived from Human Papillomavirus
IDELEDSGY

SEQ ID NO: 35931 - protein, 9 aa, Artificial Sequence
  Peptide Derived from Human Papillomavirus
IDRLTVLQH

SEQ ID NO: 35932 - protein, 11 aa, Artificial Sequence
  Peptide Derived from Human Papillomavirus
IDRLTVLQHSF

SEQ ID NO: 35933 - protein, 11 aa, Artificial Sequence
  Peptide Derived from Human Papillomavirus
IFDLSEMVQWA

SEQ ID NO: 35934 - protein, 8 aa, Artificial Sequence
  Peptide Derived from Human Papillomavirus
IGQWIQSR

SEQ ID NO: 35935 - protein, 11 aa, Artificial Sequence
  Peptide Derived from Human Papillomavirus
IGQWIQSRCEK

SEQ ID NO: 35936 - protein, 8 aa, Artificial Sequence
  Peptide Derived from Human Papillomavirus
IIILLLIR

SEQ ID NO: 35937 - protein, 9 aa, Artificial Sequence
  Peptide Derived from Human Papillomavirus
IIILLLIRF

SEQ ID NO: 35938 - protein, 10 aa, Artificial Sequence
  Peptide Derived from Human Papillomavirus
IIILLLIRFR

SEQ ID NO: 35939 - protein, 8 aa, Artificial Sequence
  Peptide Derived from Human Papillomavirus
IILLLIRF

SEQ ID NO: 35940 - protein, 9 aa, Artificial Sequence
  Peptide Derived from Human Papillomavirus
IILLLIRFR

SEQ ID NO: 35941 - protein, 8 aa, Artificial Sequence
  Peptide Derived from Human Papillomavirus
ILLLIRFR

SEQ ID NO: 35942 - protein, 11 aa, Artificial Sequence
  Peptide Derived from Human Papillomavirus
ILLLIRFRCSK

SEQ ID NO: 35943 - protein, 8 aa, Artificial Sequence
  Peptide Derived from Human Papillomavirus
ILYKFKEA

SEQ ID NO: 35944 - protein, 9 aa, Artificial Sequence
  Peptide Derived from Human Papillomavirus
ILYKFKEAY

SEQ ID NO: 35945 - protein, 8 aa, Artificial Sequence
  Peptide Derived from Human Papillomavirus
IMCRHYKK

SEQ ID NO: 35946 - protein, 9 aa, Artificial Sequence
  Peptide Derived from Human Papillomavirus
IMCRHYKKA

SEQ ID NO: 35947 - protein, 11 aa, Artificial Sequence
  Peptide Derived from Human Papillomavirus
IMCRHYKKAEK

SEQ ID NO: 35948 - protein, 9 aa, Artificial Sequence
  Peptide Derived from Human Papillomavirus
ISCVNSKSH

SEQ ID NO: 35949 - protein, 10 aa, Artificial Sequence
  Peptide Derived from Human Papillomavirus
ISCVNSKSHF

SEQ ID NO: 35950 - protein, 9 aa, Artificial Sequence
  Peptide Derived from Human Papillomavirus
ISEDEDETA

SEQ ID NO: 35951 - protein, 8 aa, Artificial Sequence
  Peptide Derived from Human Papillomavirus
ISFMELVR

SEQ ID NO: 35952 - protein, 10 aa, Artificial Sequence
  Peptide Derived from Human Papillomavirus
ISFMELVRPF

SEQ ID NO: 35953 - protein, 11 aa, Artificial Sequence
  Peptide Derived from Human Papillomavirus
ISFMELVRPFK

SEQ ID NO: 35954 - protein, 8 aa, Artificial Sequence
  Peptide Derived from Human Papillomavirus
ISIDVKHR

SEQ ID NO: 35955 - protein, 9 aa, Artificial Sequence
  Peptide Derived from Human Papillomavirus
ISIDVKHRA

SEQ ID NO: 35956 - protein, 11 aa, Artificial Sequence
  Peptide Derived from Human Papillomavirus
ISNVLHSSNTK

SEQ ID NO: 35957 - protein, 10 aa, Artificial Sequence
  Peptide Derived from Human Papillomavirus
ISPSVAESLK

SEQ ID NO: 35958 - protein, 8 aa, Artificial Sequence
  Peptide Derived from Human Papillomavirus
ISTFKCSA

SEQ ID NO: 35959 - protein, 9 aa, Artificial Sequence
  Peptide Derived from Human Papillomavirus
ISWTYIDDY

SEQ ID NO: 35960 - protein, 11 aa, Artificial Sequence
  Peptide Derived from Human Papillomavirus
ISWTYIDDYMR

SEQ ID NO: 35961 - protein, 11 aa, Artificial Sequence
  Peptide Derived from Human Papillomavirus
ITGYGISPSVA

SEQ ID NO: 35962 - protein, 10 aa, Artificial Sequence
  Peptide Derived from Human Papillomavirus
IVKDCGIMCR

SEQ ID NO: 35963 - protein, 11 aa, Artificial Sequence
  Peptide Derived from Human Papillomavirus
IVKDCGIMCRH

SEQ ID NO: 35964 - protein, 8 aa, Artificial Sequence
  Peptide Derived from Human Papillomavirus
KANILYKF

SEQ ID NO: 35965 - protein, 9 aa, Artificial Sequence
  Peptide Derived from Human Papillomavirus
KANILYKFK

SEQ ID NO: 35966 - protein, 11 aa, Artificial Sequence
  Peptide Derived from Human Papillomavirus
KANILYKFKEA

SEQ ID NO: 35967 - protein, 9 aa, Artificial Sequence
  Peptide Derived from Human Papillomavirus
KCSAGENTR

SEQ ID NO: 35968 - protein, 8 aa, Artificial Sequence
  Peptide Derived from Human Papillomavirus
KDCGIMCR

SEQ ID NO: 35969 - protein, 9 aa, Artificial Sequence
  Peptide Derived from Human Papillomavirus
KDCGIMCRH

SEQ ID NO: 35970 - protein, 10 aa, Artificial Sequence
  Peptide Derived from Human Papillomavirus
KDCGIMCRHY

SEQ ID NO: 35971 - protein, 11 aa, Artificial Sequence
  Peptide Derived from Human Papillomavirus
KDCGIMCRHYK

SEQ ID NO: 35972 - protein, 9 aa, Artificial Sequence
  Peptide Derived from Human Papillomavirus
KFAACSQSA

SEQ ID NO: 35973 - protein, 10 aa, Artificial Sequence
  Peptide Derived from Human Papillomavirus
KFAACSQSAA

SEQ ID NO: 35974 - protein, 10 aa, Artificial Sequence
  Peptide Derived from Human Papillomavirus
KFKEAYGISF

SEQ ID NO: 35975 - protein, 8 aa, Artificial Sequence
  Peptide Derived from Human Papillomavirus
KFLKGIPK

SEQ ID NO: 35976 - protein, 9 aa, Artificial Sequence
  Peptide Derived from Human Papillomavirus
KFLKGIPKK

SEQ ID NO: 35977 - protein, 11 aa, Artificial Sequence
  Peptide Derived from Human Papillomavirus
KGCVISCVNSK

SEQ ID NO: 35978 - protein, 10 aa, Artificial Sequence
  Peptide Derived from Human Papillomavirus
KIDELEDSGY

SEQ ID NO: 35979 - protein, 11 aa, Artificial Sequence
  Peptide Derived from Human Papillomavirus
KIVKDCGIMCR

SEQ ID NO: 35980 - protein, 10 aa, Artificial Sequence
  Peptide Derived from Human Papillomavirus
KLDLIEEEDK

SEQ ID NO: 35981 - protein, 8 aa, Artificial Sequence
  Peptide Derived from Human Papillomavirus
KLRSQTCA

SEQ ID NO: 35982 - protein, 10 aa, Artificial Sequence
  Peptide Derived from Human Papillomavirus
KLRSQTCALY

SEQ ID NO: 35983 - protein, 11 aa, Artificial Sequence
  Peptide Derived from Human Papillomavirus
KMSIGQWIQSR

SEQ ID NO: 35984 - protein, 10 aa, Artificial Sequence
  Peptide Derived from Human Papillomavirus
KSCMLICGPA

SEQ ID NO: 35985 - protein, 10 aa, Artificial Sequence
  Peptide Derived from Human Papillomavirus
KSFFSRTWCK

SEQ ID NO: 35986 - protein, 10 aa, Artificial Sequence
  Peptide Derived from Human Papillomavirus
KSNSQAKIVK

SEQ ID NO: 35987 - protein, 11 aa, Artificial Sequence
  Peptide Derived from Human Papillomavirus
KSYFGMSLIQF

SEQ ID NO: 35988 - protein, 9 aa, Artificial Sequence
  Peptide Derived from Human Papillomavirus
KTNDGGNWR

SEQ ID NO: 35989 - protein, 10 aa, Artificial Sequence
  Peptide Derived from Human Papillomavirus
KVLIKQHSLY

SEQ ID NO: 35990 - protein, 8 aa, Artificial Sequence
  Peptide Derived from Human Papillomavirus
LADSNSNA

SEQ ID NO: 35991 - protein, 9 aa, Artificial Sequence
  Peptide Derived from Human Papillomavirus
LADSNSNAA

SEQ ID NO: 35992 - protein, 10 aa, Artificial Sequence
  Peptide Derived from Human Papillomavirus
LADSNSNAAA

SEQ ID NO: 35993 - protein, 11 aa, Artificial Sequence
  Peptide Derived from Human Papillomavirus
LADSNSNAAAF

SEQ ID NO: 35994 - protein, 11 aa, Artificial Sequence
  Peptide Derived from Human Papillomavirus
LDGNEISIDVK

SEQ ID NO: 35995 - protein, 9 aa, Artificial Sequence
  Peptide Derived from Human Papillomavirus
LDLIEEEDK

SEQ ID NO: 35996 - protein, 9 aa, Artificial Sequence
  Peptide Derived from Human Papillomavirus
LGAFKKFLK

SEQ ID NO: 35997 - protein, 10 aa, Artificial Sequence
  Peptide Derived from Human Papillomavirus
LICGPANTGK

SEQ ID NO: 35998 - protein, 10 aa, Artificial Sequence
  Peptide Derived from Human Papillomavirus
LIEEEDKENH

SEQ ID NO: 35999 - protein, 8 aa, Artificial Sequence
  Peptide Derived from Human Papillomavirus
LIKQHSLY

SEQ ID NO: 36000 - protein, 10 aa, Artificial Sequence
  Peptide Derived from Human Papillomavirus
LIKQHSLYTH

SEQ ID NO: 36001 - protein, 8 aa, Artificial Sequence
  Peptide Derived from Human Papillomavirus
LIRFRCSK

SEQ ID NO: 36002 - protein, 10 aa, Artificial Sequence
  Peptide Derived from Human Papillomavirus
LIRFRCSKNR

SEQ ID NO: 36003 - protein, 9 aa, Artificial Sequence
  Peptide Derived from Human Papillomavirus
LLIRFRCSK

SEQ ID NO: 36004 - protein, 11 aa, Artificial Sequence
  Peptide Derived from Human Papillomavirus
LLIRFRCSKNR

SEQ ID NO: 36005 - protein, 10 aa, Artificial Sequence
  Peptide Derived from Human Papillomavirus
LLLIRFRCSK

SEQ ID NO: 36006 - protein, 9 aa, Artificial Sequence
  Peptide Derived from Human Papillomavirus
LLLTSNTNA

SEQ ID NO: 36007 - protein, 9 aa, Artificial Sequence
  Peptide Derived from Human Papillomavirus
LLRYQNIEF

SEQ ID NO: 36008 - protein, 11 aa, Artificial Sequence
  Peptide Derived from Human Papillomavirus
LLRYQNIEFTA

SEQ ID NO: 36009 - protein, 8 aa, Artificial Sequence
  Peptide Derived from Human Papillomavirus
LLTSNTNA

SEQ ID NO: 36010 - protein, 8 aa, Artificial Sequence
  Peptide Derived from Human Papillomavirus
LSEMVQWA

SEQ ID NO: 36011 - protein, 9 aa, Artificial Sequence
  Peptide Derived from Human Papillomavirus
LSEMVQWAY

SEQ ID NO: 36012 - protein, 8 aa, Artificial Sequence
  Peptide Derived from Human Papillomavirus
LTDDSDIA

SEQ ID NO: 36013 - protein, 9 aa, Artificial Sequence
  Peptide Derived from Human Papillomavirus
LTDDSDIAY

SEQ ID NO: 36014 - protein, 10 aa, Artificial Sequence
  Peptide Derived from Human Papillomavirus
LTDDSDIAYY

SEQ ID NO: 36015 - protein, 11 aa, Artificial Sequence
  Peptide Derived from Human Papillomavirus
LTDDSDIAYYY

SEQ ID NO: 36016 - protein, 10 aa, Artificial Sequence
  Peptide Derived from Human Papillomavirus
LTVFEFKNPF

SEQ ID NO: 36017 - protein, 8 aa, Artificial Sequence
  Peptide Derived from Human Papillomavirus
LTVLQHSF

SEQ ID NO: 36018 - protein, 9 aa, Artificial Sequence
  Peptide Derived from Human Papillomavirus
LVRPFKSDK

SEQ ID NO: 36019 - protein, 10 aa, Artificial Sequence
  Peptide Derived from Human Papillomavirus
MADPEGTNGA

SEQ ID NO: 36020 - protein, 8 aa, Artificial Sequence
  Peptide Derived from Human Papillomavirus
MCRHYKKA

SEQ ID NO: 36021 - protein, 10 aa, Artificial Sequence
  Peptide Derived from Human Papillomavirus
MCRHYKKAEK

SEQ ID NO: 36022 - protein, 11 aa, Artificial Sequence
  Peptide Derived from Human Papillomavirus
MCRHYKKAEKR

SEQ ID NO: 36023 - protein, 11 aa, Artificial Sequence
  Peptide Derived from Human Papillomavirus
MGCTGWFEVEA

SEQ ID NO: 36024 - protein, 11 aa, Artificial Sequence
  Peptide Derived from Human Papillomavirus
MLICGPANTGK

SEQ ID NO: 36025 - protein, 10 aa, Artificial Sequence
  Peptide Derived from Human Papillomavirus
MSIGQWIQSR

SEQ ID NO: 36026 - protein, 8 aa, Artificial Sequence
  Peptide Derived from Human Papillomavirus
MSLIQFLK

SEQ ID NO: 36027 - protein, 9 aa, Artificial Sequence
  Peptide Derived from Human Papillomavirus
MVIEPPKLR

SEQ ID NO: 36028 - protein, 10 aa, Artificial Sequence
  Peptide Derived from Human Papillomavirus
NAGTDSRWPY

SEQ ID NO: 36029 - protein, 8 aa, Artificial Sequence
  Peptide Derived from Human Papillomavirus
NAVCALKR

SEQ ID NO: 36030 - protein, 9 aa, Artificial Sequence
  Peptide Derived from Human Papillomavirus
NAVCALKRK

SEQ ID NO: 36031 - protein, 10 aa, Artificial Sequence
  Peptide Derived from Human Papillomavirus
NAVCALKRKF

SEQ ID NO: 36032 - protein, 11 aa, Artificial Sequence
  Peptide Derived from Human Papillomavirus
NAVCALKRKFA

SEQ ID NO: 36033 - protein, 8 aa, Artificial Sequence
  Peptide Derived from Human Papillomavirus
NDENWKSF

SEQ ID NO: 36034 - protein, 9 aa, Artificial Sequence
  Peptide Derived from Human Papillomavirus
NDENWKSFF

SEQ ID NO: 36035 - protein, 11 aa, Artificial Sequence
  Peptide Derived from Human Papillomavirus
NDENWKSFFSR

SEQ ID NO: 36036 - protein, 11 aa, Artificial Sequence
  Peptide Derived from Human Papillomavirus
NGAGMGCTGWF

SEQ ID NO: 36037 - protein, 10 aa, Artificial Sequence
  Peptide Derived from Human Papillomavirus
NIEFTAFLGA

SEQ ID NO: 36038 - protein, 11 aa, Artificial Sequence
  Peptide Derived from Human Papillomavirus
NIEFTAFLGAF

SEQ ID NO: 36039 - protein, 9 aa, Artificial Sequence
  Peptide Derived from Human Papillomavirus
NILYKFKEA

SEQ ID NO: 36040 - protein, 10 aa, Artificial Sequence
  Peptide Derived from Human Papillomavirus
NILYKFKEAY

SEQ ID NO: 36041 - protein, 11 aa, Artificial Sequence
  Peptide Derived from Human Papillomavirus
NIQEGEDDLNA

SEQ ID NO: 36042 - protein, 10 aa, Artificial Sequence
  Peptide Derived from Human Papillomavirus
NISEDEDETA

SEQ ID NO: 36043 - protein, 9 aa, Artificial Sequence
  Peptide Derived from Human Papillomavirus
NISTFKCSA

SEQ ID NO: 36044 - protein, 9 aa, Artificial Sequence
  Peptide Derived from Human Papillomavirus
NSIQADTEA

SEQ ID NO: 36045 - protein, 10 aa, Artificial Sequence
  Peptide Derived from Human Papillomavirus
NSIQADTEAA

SEQ ID NO: 36046 - protein, 11 aa, Artificial Sequence
  Peptide Derived from Human Papillomavirus
NSIQADTEAAR

SEQ ID NO: 36047 - protein, 9 aa, Artificial Sequence
  Peptide Derived from Human Papillomavirus
NSNAAAFLK

SEQ ID NO: 36048 - protein, 8 aa, Artificial Sequence
  Peptide Derived from Human Papillomavirus
NSQAKIVK

SEQ ID NO: 36049 - protein, 8 aa, Artificial Sequence
  Peptide Derived from Human Papillomavirus
NTKANILY

SEQ ID NO: 36050 - protein, 9 aa, Artificial Sequence
  Peptide Derived from Human Papillomavirus
NTKANILYK

SEQ ID NO: 36051 - protein, 10 aa, Artificial Sequence
  Peptide Derived from Human Papillomavirus
NTKANILYKF

SEQ ID NO: 36052 - protein, 11 aa, Artificial Sequence
  Peptide Derived from Human Papillomavirus
NTKANILYKFK

SEQ ID NO: 36053 - protein, 9 aa, Artificial Sequence
  Peptide Derived from Human Papillomavirus
NTNAGTDSR

SEQ ID NO: 36054 - protein, 9 aa, Artificial Sequence
  Peptide Derived from Human Papillomavirus
NVLHSSNTK

SEQ ID NO: 36055 - protein, 10 aa, Artificial Sequence
  Peptide Derived from Human Papillomavirus
NVLHSSNTKA

SEQ ID NO: 36056 - protein, 8 aa, Artificial Sequence
  Peptide Derived from Human Papillomavirus
PANTGKSY

SEQ ID NO: 36057 - protein, 9 aa, Artificial Sequence
  Peptide Derived from Human Papillomavirus
PANTGKSYF

SEQ ID NO: 36058 - protein, 8 aa, Artificial Sequence
  Peptide Derived from Human Papillomavirus
PCRTSINK

SEQ ID NO: 36059 - protein, 10 aa, Artificial Sequence
  Peptide Derived from Human Papillomavirus
PCRTSINKNK

SEQ ID NO: 36060 - protein, 10 aa, Artificial Sequence
  Peptide Derived from Human Papillomavirus
PFDENGNPVY

SEQ ID NO: 36061 - protein, 11 aa, Artificial Sequence
  Peptide Derived from Human Papillomavirus
PFDENGNPVYA

SEQ ID NO: 36062 - protein, 10 aa, Artificial Sequence
  Peptide Derived from Human Papillomavirus
PISWTYIDDY

SEQ ID NO: 36063 - protein, 8 aa, Artificial Sequence
  Peptide Derived from Human Papillomavirus
PIVQLLRY

SEQ ID NO: 36064 - protein, 10 aa, Artificial Sequence
  Peptide Derived from Human Papillomavirus
PLLLTSNTNA

SEQ ID NO: 36065 - protein, 8 aa, Artificial Sequence
  Peptide Derived from Human Papillomavirus
PSVAESLK

SEQ ID NO: 36066 - protein, 11 aa, Artificial Sequence
  Peptide Derived from Human Papillomavirus
PVYAINDENWK

SEQ ID NO: 36067 - protein, 8 aa, Artificial Sequence
  Peptide Derived from Human Papillomavirus
QADTEAAR

SEQ ID NO: 36068 - protein, 9 aa, Artificial Sequence
  Peptide Derived from Human Papillomavirus
QADTEAARA

SEQ ID NO: 36069 - protein, 11 aa, Artificial Sequence
  Peptide Derived from Human Papillomavirus
QADTEAARALF

SEQ ID NO: 36070 - protein, 10 aa, Artificial Sequence
  Peptide Derived from Human Papillomavirus
QGTTPEWIDR

SEQ ID NO: 36071 - protein, 9 aa, Artificial Sequence
  Peptide Derived from Human Papillomavirus
QLADSNSNA

SEQ ID NO: 36072 - protein, 10 aa, Artificial Sequence
  Peptide Derived from Human Papillomavirus
QLADSNSNAA

SEQ ID NO: 36073 - protein, 11 aa, Artificial Sequence
  Peptide Derived from Human Papillomavirus
QLADSNSNAAA

SEQ ID NO: 36074 - protein, 10 aa, Artificial Sequence
  Peptide Derived from Human Papillomavirus
QLLRYQNIEF

SEQ ID NO: 36075 - protein, 10 aa, Artificial Sequence
  Peptide Derived from Human Papillomavirus
QSAAEDVVDR

SEQ ID NO: 36076 - protein, 11 aa, Artificial Sequence
  Peptide Derived from Human Papillomavirus
QSAAEDVVDRA

SEQ ID NO: 36077 - protein, 8 aa, Artificial Sequence
  Peptide Derived from Human Papillomavirus
QTCALYWF

SEQ ID NO: 36078 - protein, 9 aa, Artificial Sequence
  Peptide Derived from Human Papillomavirus
QTCALYWFR

SEQ ID NO: 36079 - protein, 11 aa, Artificial Sequence
  Peptide Derived from Human Papillomavirus
QTCALYWFRTA

SEQ ID NO: 36080 - protein, 10 aa, Artificial Sequence
  Peptide Derived from Human Papillomavirus
RCSKNRLTVA

SEQ ID NO: 36081 - protein, 11 aa, Artificial Sequence
  Peptide Derived from Human Papillomavirus
RCSKNRLTVAK

SEQ ID NO: 36082 - protein, 8 aa, Artificial Sequence
  Peptide Derived from Human Papillomavirus
RFRCSKNR

SEQ ID NO: 36083 - protein, 10 aa, Artificial Sequence
  Peptide Derived from Human Papillomavirus
RGIIILLLIR

SEQ ID NO: 36084 - protein, 11 aa, Artificial Sequence
  Peptide Derived from Human Papillomavirus
RGIIILLLIRF

SEQ ID NO: 36085 - protein, 8 aa, Artificial Sequence
  Peptide Derived from Human Papillomavirus
RLTVFEFK

SEQ ID NO: 36086 - protein, 11 aa, Artificial Sequence
  Peptide Derived from Human Papillomavirus
RLTVFEFKNPF

SEQ ID NO: 36087 - protein, 9 aa, Artificial Sequence
  Peptide Derived from Human Papillomavirus
RLTVLQHSF

SEQ ID NO: 36088 - protein, 8 aa, Artificial Sequence
  Peptide Derived from Human Papillomavirus
RSQTCALY

SEQ ID NO: 36089 - protein, 10 aa, Artificial Sequence
  Peptide Derived from Human Papillomavirus
RSQTCALYWF

SEQ ID NO: 36090 - protein, 11 aa, Artificial Sequence
  Peptide Derived from Human Papillomavirus
RSQTCALYWFR

SEQ ID NO: 36091 - protein, 8 aa, Artificial Sequence
  Peptide Derived from Human Papillomavirus
RTSINKNK

SEQ ID NO: 36092 - protein, 9 aa, Artificial Sequence
  Peptide Derived from Human Papillomavirus
SAAEDVVDR

SEQ ID NO: 36093 - protein, 10 aa, Artificial Sequence
  Peptide Derived from Human Papillomavirus
SAAEDVVDRA

SEQ ID NO: 36094 - protein, 11 aa, Artificial Sequence
  Peptide Derived from Human Papillomavirus
SAAEDVVDRAA

SEQ ID NO: 36095 - protein, 10 aa, Artificial Sequence
  Peptide Derived from Human Papillomavirus
SAGENTRSLR

SEQ ID NO: 36096 - protein, 9 aa, Artificial Sequence
  Peptide Derived from Human Papillomavirus
SCMLICGPA

SEQ ID NO: 36097 - protein, 10 aa, Artificial Sequence
  Peptide Derived from Human Papillomavirus
SCTDWCITGY

SEQ ID NO: 36098 - protein, 8 aa, Artificial Sequence
  Peptide Derived from Human Papillomavirus
SCVNSKSH

SEQ ID NO: 36099 - protein, 9 aa, Artificial Sequence
  Peptide Derived from Human Papillomavirus
SCVNSKSHF

SEQ ID NO: 36100 - protein, 8 aa, Artificial Sequence
  Peptide Derived from Human Papillomavirus
SDIAYYYA

SEQ ID NO: 36101 - protein, 11 aa, Artificial Sequence
  Peptide Derived from Human Papillomavirus
SDIAYYYAQLA

SEQ ID NO: 36102 - protein, 9 aa, Artificial Sequence
  Peptide Derived from Human Papillomavirus
SFFSRTWCK

SEQ ID NO: 36103 - protein, 9 aa, Artificial Sequence
  Peptide Derived from Human Papillomavirus
SFMELVRPF

SEQ ID NO: 36104 - protein, 10 aa, Artificial Sequence
  Peptide Derived from Human Papillomavirus
SFMELVRPFK

SEQ ID NO: 36105 - protein, 8 aa, Artificial Sequence
  Peptide Derived from Human Papillomavirus
SGTDLLEF

SEQ ID NO: 36106 - protein, 8 aa, Artificial Sequence
  Peptide Derived from Human Papillomavirus
SIDVKHRA

SEQ ID NO: 36107 - protein, 9 aa, Artificial Sequence
  Peptide Derived from Human Papillomavirus
SIGQWIQSR

SEQ ID NO: 36108 - protein, 10 aa, Artificial Sequence
  Peptide Derived from Human Papillomavirus
SINKNKECTY

SEQ ID NO: 36109 - protein, 11 aa, Artificial Sequence
  Peptide Derived from Human Papillomavirus
SINKNKECTYR

SEQ ID NO: 36110 - protein, 8 aa, Artificial Sequence
  Peptide Derived from Human Papillomavirus
SIQADTEA

SEQ ID NO: 36111 - protein, 9 aa, Artificial Sequence
  Peptide Derived from Human Papillomavirus
SIQADTEAA

SEQ ID NO: 36112 - protein, 10 aa, Artificial Sequence
  Peptide Derived from Human Papillomavirus
SIQADTEAAR

SEQ ID NO: 36113 - protein, 11 aa, Artificial Sequence
  Peptide Derived from Human Papillomavirus
SIQADTEAARA

SEQ ID NO: 36114 - protein, 9 aa, Artificial Sequence
  Peptide Derived from Human Papillomavirus
SLKVLIKQH

SEQ ID NO: 36115 - protein, 8 aa, Artificial Sequence
  Peptide Derived from Human Papillomavirus
SMENSIQA

SEQ ID NO: 36116 - protein, 10 aa, Artificial Sequence
  Peptide Derived from Human Papillomavirus
SSNTKANILY

SEQ ID NO: 36117 - protein, 11 aa, Artificial Sequence
  Peptide Derived from Human Papillomavirus
SSNTKANILYK

SEQ ID NO: 36118 - protein, 11 aa, Artificial Sequence
  Peptide Derived from Human Papillomavirus
SVAESLKVLIK

SEQ ID NO: 36119 - protein, 8 aa, Artificial Sequence
  Peptide Derived from Human Papillomavirus
TAFLGAFK

SEQ ID NO: 36120 - protein, 9 aa, Artificial Sequence
  Peptide Derived from Human Papillomavirus
TAFLGAFKK

SEQ ID NO: 36121 - protein, 10 aa, Artificial Sequence
  Peptide Derived from Human Papillomavirus
TAFLGAFKKF

SEQ ID NO: 36122 - protein, 8 aa, Artificial Sequence
  Peptide Derived from Human Papillomavirus
TCALYWFR

SEQ ID NO: 36123 - protein, 10 aa, Artificial Sequence
  Peptide Derived from Human Papillomavirus
TCALYWFRTA

SEQ ID NO: 36124 - protein, 9 aa, Artificial Sequence
  Peptide Derived from Human Papillomavirus
TCMVIEPPK

SEQ ID NO: 36125 - protein, 11 aa, Artificial Sequence
  Peptide Derived from Human Papillomavirus
TCMVIEPPKLR

SEQ ID NO: 36126 - protein, 8 aa, Artificial Sequence
  Peptide Derived from Human Papillomavirus
TDDSDIAY

SEQ ID NO: 36127 - protein, 9 aa, Artificial Sequence
  Peptide Derived from Human Papillomavirus
TDDSDIAYY

SEQ ID NO: 36128 - protein, 10 aa, Artificial Sequence
  Peptide Derived from Human Papillomavirus
TDDSDIAYYY

SEQ ID NO: 36129 - protein, 11 aa, Artificial Sequence
  Peptide Derived from Human Papillomavirus
TDDSDIAYYYA

SEQ ID NO: 36130 - protein, 9 aa, Artificial Sequence
  Peptide Derived from Human Papillomavirus
TDSRWPYLH

SEQ ID NO: 36131 - protein, 11 aa, Artificial Sequence
  Peptide Derived from Human Papillomavirus
TDSRWPYLHSR

SEQ ID NO: 36132 - protein, 8 aa, Artificial Sequence
  Peptide Derived from Human Papillomavirus
TDWCITGY

SEQ ID NO: 36133 - protein, 11 aa, Artificial Sequence
  Peptide Derived from Human Papillomavirus
TFKCSAGENTR

SEQ ID NO: 36134 - protein, 8 aa, Artificial Sequence
  Peptide Derived from Human Papillomavirus
TGWFEVEA

SEQ ID NO: 36135 - protein, 10 aa, Artificial Sequence
  Peptide Derived from Human Papillomavirus
TGYGISPSVA

SEQ ID NO: 36136 - protein, 10 aa, Artificial Sequence
  Peptide Derived from Human Papillomavirus
TLQEISNVLH

SEQ ID NO: 36137 - protein, 11 aa, Artificial Sequence
  Peptide Derived from Human Papillomavirus
TSCTDWCITGY

SEQ ID NO: 36138 - protein, 11 aa, Artificial Sequence
  Peptide Derived from Human Papillomavirus
TSINKNKECTY

SEQ ID NO: 36139 - protein, 11 aa, Artificial Sequence
  Peptide Derived from Human Papillomavirus
TSNTNAGTDSR

SEQ ID NO: 36140 - protein, 8 aa, Artificial Sequence
  Peptide Derived from Human Papillomavirus
TTPEWIDR

SEQ ID NO: 36141 - protein, 9 aa, Artificial Sequence
  Peptide Derived from Human Papillomavirus
TVFEFKNPF

SEQ ID NO: 36142 - protein, 11 aa, Artificial Sequence
  Peptide Derived from Human Papillomavirus
TVFEFKNPFPF

SEQ ID NO: 36143 - protein, 10 aa, Artificial Sequence
  Peptide Derived from Human Papillomavirus
VAESLKVLIK

SEQ ID NO: 36144 - protein, 8 aa, Artificial Sequence
  Peptide Derived from Human Papillomavirus
VCALKRKF

SEQ ID NO: 36145 - protein, 9 aa, Artificial Sequence
  Peptide Derived from Human Papillomavirus
VCALKRKFA

SEQ ID NO: 36146 - protein, 10 aa, Artificial Sequence
  Peptide Derived from Human Papillomavirus
VCALKRKFAA

SEQ ID NO: 36147 - protein, 9 aa, Artificial Sequence
  Peptide Derived from Human Papillomavirus
VDRAANPCR

SEQ ID NO: 36148 - protein, 8 aa, Artificial Sequence
  Peptide Derived from Human Papillomavirus
VFEFKNPF

SEQ ID NO: 36149 - protein, 10 aa, Artificial Sequence
  Peptide Derived from Human Papillomavirus
VFEFKNPFPF

SEQ ID NO: 36150 - protein, 8 aa, Artificial Sequence
  Peptide Derived from Human Papillomavirus
VIEPPKLR

SEQ ID NO: 36151 - protein, 8 aa, Artificial Sequence
  Peptide Derived from Human Papillomavirus
VISCVNSK

SEQ ID NO: 36152 - protein, 10 aa, Artificial Sequence
  Peptide Derived from Human Papillomavirus
VISCVNSKSH

SEQ ID NO: 36153 - protein, 11 aa, Artificial Sequence
  Peptide Derived from Human Papillomavirus
VISCVNSKSHF

SEQ ID NO: 36154 - protein, 8 aa, Artificial Sequence
  Peptide Derived from Human Papillomavirus
VLHSSNTK

SEQ ID NO: 36155 - protein, 9 aa, Artificial Sequence
  Peptide Derived from Human Papillomavirus
VLHSSNTKA

SEQ ID NO: 36156 - protein, 9 aa, Artificial Sequence
  Peptide Derived from Human Papillomavirus
VLIKQHSLY

SEQ ID NO: 36157 - protein, 11 aa, Artificial Sequence
  Peptide Derived from Human Papillomavirus
VLIKQHSLYTH

SEQ ID NO: 36158 - protein, 11 aa, Artificial Sequence
  Peptide Derived from Human Papillomavirus
VLQHSFNDNIF

SEQ ID NO: 36159 - protein, 11 aa, Artificial Sequence
  Peptide Derived from Human Papillomavirus
VTLQEISNVLH

SEQ ID NO: 36160 - protein, 8 aa, Artificial Sequence
  Peptide Derived from Human Papillomavirus
VTPISWTY

SEQ ID NO: 36161 - protein, 10 aa, Artificial Sequence
  Peptide Derived from Human Papillomavirus
VVDRAANPCR

SEQ ID NO: 36162 - protein, 10 aa, Artificial Sequence
  Peptide Derived from Human Papillomavirus
WFEVEAVIER

SEQ ID NO: 36163 - protein, 11 aa, Artificial Sequence
  Peptide Derived from Human Papillomavirus
WFEVEAVIERR

SEQ ID NO: 36164 - protein, 10 aa, Artificial Sequence
  Peptide Derived from Human Papillomavirus
WIDRLTVLQH

SEQ ID NO: 36165 - protein, 8 aa, Artificial Sequence
  Peptide Derived from Human Papillomavirus
WIQSRCEK

SEQ ID NO: 36166 - protein, 8 aa, Artificial Sequence
  Peptide Derived from Human Papillomavirus
WLQPLSDA

SEQ ID NO: 36167 - protein, 9 aa, Artificial Sequence
  Peptide Derived from Human Papillomavirus
WLQPLSDAK

SEQ ID NO: 36168 - protein, 9 aa, Artificial Sequence
  Peptide Derived from Human Papillomavirus
WTYIDDYMR

SEQ ID NO: 36169 - protein, 11 aa, Artificial Sequence
  Peptide Derived from Human Papillomavirus
WTYIDDYMRNA

SEQ ID NO: 36170 - protein, 9 aa, Artificial Sequence
  Peptide Derived from Human Papillomavirus
YAINDENWK

SEQ ID NO: 36171 - protein, 11 aa, Artificial Sequence
  Peptide Derived from Human Papillomavirus
YAINDENWKSF

SEQ ID NO: 36172 - protein, 11 aa, Artificial Sequence
  Peptide Derived from Human Papillomavirus
YAQLADSNSNA

SEQ ID NO: 36173 - protein, 9 aa, Artificial Sequence
  Peptide Derived from Human Papillomavirus
YFGMSLIQF

SEQ ID NO: 36174 - protein, 11 aa, Artificial Sequence
  Peptide Derived from Human Papillomavirus
YFGMSLIQFLK

SEQ ID NO: 36175 - protein, 10 aa, Artificial Sequence
  Peptide Derived from Human Papillomavirus
YGISFMELVR

SEQ ID NO: 36176 - protein, 8 aa, Artificial Sequence
  Peptide Derived from Human Papillomavirus
YGISPSVA

SEQ ID NO: 36177 - protein, 9 aa, Artificial Sequence
  Peptide Derived from Human Papillomavirus
YIDDYMRNA

SEQ ID NO: 36178 - protein, 9 aa, Artificial Sequence
  Peptide Derived from Human Papillomavirus
YLHSRLTVF

SEQ ID NO: 36179 - protein, 11 aa, Artificial Sequence
  Peptide Derived from Human Papillomavirus
YLHSRLTVFEF

SEQ ID NO: 36180 - protein, 11 aa, Artificial Sequence
  Peptide Derived from Human Papillomavirus
YTHLQCLTCDR

SEQ ID NO: 36181 - protein, 9 aa, Artificial Sequence
  Peptide Derived from Human Papillomavirus
AAAKRRRPA

SEQ ID NO: 36182 - protein, 8 aa, Artificial Sequence
  Peptide Derived from Human Papillomavirus
AAKRRRPA

SEQ ID NO: 36183 - protein, 10 aa, Artificial Sequence
  Peptide Derived from Human Papillomavirus
ADIQTDNDNR

SEQ ID NO: 36184 - protein, 8 aa, Artificial Sequence
  Peptide Derived from Human Papillomavirus
ADPALDNR

SEQ ID NO: 36185 - protein, 10 aa, Artificial Sequence
  Peptide Derived from Human Papillomavirus
ADPALDNRTA

SEQ ID NO: 36186 - protein, 11 aa, Artificial Sequence
  Peptide Derived from Human Papillomavirus
ADPALDNRTAR

SEQ ID NO: 36187 - protein, 10 aa, Artificial Sequence
  Peptide Derived from Human Papillomavirus
AFQVIELQMA

SEQ ID NO: 36188 - protein, 8 aa, Artificial Sequence
  Peptide Derived from Human Papillomavirus
ALDNRTAR

SEQ ID NO: 36189 - protein, 10 aa, Artificial Sequence
  Peptide Derived from Human Papillomavirus
ALDNRTARTA

SEQ ID NO: 36190 - protein, 10 aa, Artificial Sequence
  Peptide Derived from Human Papillomavirus
ALETLSKSQY

SEQ ID NO: 36191 - protein, 11 aa, Artificial Sequence
  Peptide Derived from Human Papillomavirus
ALLYTAKQMGF

SEQ ID NO: 36192 - protein, 9 aa, Artificial Sequence
  Peptide Derived from Human Papillomavirus
ATNCTNKQR

SEQ ID NO: 36193 - protein, 10 aa, Artificial Sequence
  Peptide Derived from Human Papillomavirus
AVQEKILDLY

SEQ ID NO: 36194 - protein, 9 aa, Artificial Sequence
  Peptide Derived from Human Papillomavirus
CADPALDNR

SEQ ID NO: 36195 - protein, 11 aa, Artificial Sequence
  Peptide Derived from Human Papillomavirus
CADPALDNRTA

SEQ ID NO: 36196 - protein, 8 aa, Artificial Sequence
  Peptide Derived from Human Papillomavirus
CALLYTAK

SEQ ID NO: 36197 - protein, 9 aa, Artificial Sequence
  Peptide Derived from Human Papillomavirus
CLRYRLKPY

SEQ ID NO: 36198 - protein, 10 aa, Artificial Sequence
  Peptide Derived from Human Papillomavirus
CLRYRLKPYK

SEQ ID NO: 36199 - protein, 10 aa, Artificial Sequence
  Peptide Derived from Human Papillomavirus
CSSNVAPIVH

SEQ ID NO: 36200 - protein, 10 aa, Artificial Sequence
  Peptide Derived from Human Papillomavirus
CTMVTGKVDY

SEQ ID NO: 36201 - protein, 9 aa, Artificial Sequence
  Peptide Derived from Human Papillomavirus
DIQTDNDNR

SEQ ID NO: 36202 - protein, 8 aa, Artificial Sequence
  Peptide Derived from Human Papillomavirus
DLPSQIEH

SEQ ID NO: 36203 - protein, 10 aa, Artificial Sequence
  Peptide Derived from Human Papillomavirus
DLPSQIEHWK

SEQ ID NO: 36204 - protein, 8 aa, Artificial Sequence
  Peptide Derived from Human Papillomavirus
DTAQPLTK

SEQ ID NO: 36205 - protein, 10 aa, Artificial Sequence
  Peptide Derived from Human Papillomavirus
DTAQPLTKLF

SEQ ID NO: 36206 - protein, 9 aa, Artificial Sequence
  Peptide Derived from Human Papillomavirus
DTCTMVTGK

SEQ ID NO: 36207 - protein, 11 aa, Artificial Sequence
  Peptide Derived from Human Papillomavirus
DTTDTAQPLTK

SEQ ID NO: 36208 - protein, 8 aa, Artificial Sequence
  Peptide Derived from Human Papillomavirus
ECALLYTA

SEQ ID NO: 36209 - protein, 9 aa, Artificial Sequence
  Peptide Derived from Human Papillomavirus
ECALLYTAK

SEQ ID NO: 36210 - protein, 8 aa, Artificial Sequence
  Peptide Derived from Human Papillomavirus
EDAAKYSK

SEQ ID NO: 36211 - protein, 10 aa, Artificial Sequence
  Peptide Derived from Human Papillomavirus
EDTCTMVTGK

SEQ ID NO: 36212 - protein, 8 aa, Artificial Sequence
  Peptide Derived from Human Papillomavirus
EISARLNA

SEQ ID NO: 36213 - protein, 11 aa, Artificial Sequence
  Peptide Derived from Human Papillomavirus
ELQMALETLSK

SEQ ID NO: 36214 - protein, 11 aa, Artificial Sequence
  Peptide Derived from Human Papillomavirus
ELYSSMSSTWH

SEQ ID NO: 36215 - protein, 9 aa, Artificial Sequence
  Peptide Derived from Human Papillomavirus
ESNSLKCLR

SEQ ID NO: 36216 - protein, 10 aa, Artificial Sequence
  Peptide Derived from Human Papillomavirus
ESNSLKCLRY

SEQ ID NO: 36217 - protein, 11 aa, Artificial Sequence
  Peptide Derived from Human Papillomavirus
ESNSLKCLRYR

SEQ ID NO: 36218 - protein, 8 aa, Artificial Sequence
  Peptide Derived from Human Papillomavirus
ETLSKSQY

SEQ ID NO: 36219 - protein, 11 aa, Artificial Sequence
  Peptide Derived from Human Papillomavirus
ETVTVQYDNDK

SEQ ID NO: 36220 - protein, 9 aa, Artificial Sequence
  Peptide Derived from Human Papillomavirus
EVWLCEPPK

SEQ ID NO: 36221 - protein, 11 aa, Artificial Sequence
  Peptide Derived from Human Papillomavirus
EVWLCEPPKCF

SEQ ID NO: 36222 - protein, 10 aa, Artificial Sequence
  Peptide Derived from Human Papillomavirus
FCADPALDNR

SEQ ID NO: 36223 - protein, 10 aa, Artificial Sequence
  Peptide Derived from Human Papillomavirus
FVTEQQQQMF

SEQ ID NO: 36224 - protein, 10 aa, Artificial Sequence
  Peptide Derived from Human Papillomavirus
GMYYIHNCEK

SEQ ID NO: 36225 - protein, 10 aa, Artificial Sequence
  Peptide Derived from Human Papillomavirus
HLKGESNSLK

SEQ ID NO: 36226 - protein, 11 aa, Artificial Sequence
  Peptide Derived from Human Papillomavirus
IGMYYIHNCEK

SEQ ID NO: 36227 - protein, 9 aa, Artificial Sequence
  Peptide Derived from Human Papillomavirus
ILDLYEADK

SEQ ID NO: 36228 - protein, 11 aa, Artificial Sequence
  Peptide Derived from Human Papillomavirus
ISARLNAVQEK

SEQ ID NO: 36229 - protein, 11 aa, Artificial Sequence
  Peptide Derived from Human Papillomavirus
KAFQVIELQMA

SEQ ID NO: 36230 - protein, 8 aa, Artificial Sequence
  Peptide Derived from Human Papillomavirus
KCLRYRLK

SEQ ID NO: 36231 - protein, 10 aa, Artificial Sequence
  Peptide Derived from Human Papillomavirus
KCLRYRLKPY

SEQ ID NO: 36232 - protein, 11 aa, Artificial Sequence
  Peptide Derived from Human Papillomavirus
KCLRYRLKPYK

SEQ ID NO: 36233 - protein, 8 aa, Artificial Sequence
  Peptide Derived from Human Papillomavirus
KGESNSLK

SEQ ID NO: 36234 - protein, 11 aa, Artificial Sequence
  Peptide Derived from Human Papillomavirus
KGESNSLKCLR

SEQ ID NO: 36235 - protein, 8 aa, Artificial Sequence
  Peptide Derived from Human Papillomavirus
KILDLYEA

SEQ ID NO: 36236 - protein, 10 aa, Artificial Sequence
  Peptide Derived from Human Papillomavirus
KILDLYEADK

SEQ ID NO: 36237 - protein, 8 aa, Artificial Sequence
  Peptide Derived from Human Papillomavirus
KLFCADPA

SEQ ID NO: 36238 - protein, 8 aa, Artificial Sequence
  Peptide Derived from Human Papillomavirus
KLIRMECA

SEQ ID NO: 36239 - protein, 11 aa, Artificial Sequence
  Peptide Derived from Human Papillomavirus
KLIRMECALLY

SEQ ID NO: 36240 - protein, 10 aa, Artificial Sequence
  Peptide Derived from Human Papillomavirus
KTDLPSQIEH

SEQ ID NO: 36241 - protein, 8 aa, Artificial Sequence
  Peptide Derived from Human Papillomavirus
KTQMWEVH

SEQ ID NO: 36242 - protein, 8 aa, Artificial Sequence
  Peptide Derived from Human Papillomavirus
KVDYIGMY

SEQ ID NO: 36243 - protein, 9 aa, Artificial Sequence
  Peptide Derived from Human Papillomavirus
KVDYIGMYY

SEQ ID NO: 36244 - protein, 11 aa, Artificial Sequence
  Peptide Derived from Human Papillomavirus
KVDYIGMYYIH

SEQ ID NO: 36245 - protein, 8 aa, Artificial Sequence
  Peptide Derived from Human Papillomavirus
KVYFKYFK

SEQ ID NO: 36246 - protein, 11 aa, Artificial Sequence
  Peptide Derived from Human Papillomavirus
KVYFKYFKEDA

SEQ ID NO: 36247 - protein, 8 aa, Artificial Sequence
  Peptide Derived from Human Papillomavirus
LASKTKAF

SEQ ID NO: 36248 - protein, 8 aa, Artificial Sequence
  Peptide Derived from Human Papillomavirus
LCEPPKCF

SEQ ID NO: 36249 - protein, 9 aa, Artificial Sequence
  Peptide Derived from Human Papillomavirus
LCEPPKCFK

SEQ ID NO: 36250 - protein, 10 aa, Artificial Sequence
  Peptide Derived from Human Papillomavirus
LCEPPKCFKK

SEQ ID NO: 36251 - protein, 11 aa, Artificial Sequence
  Peptide Derived from Human Papillomavirus
LCHQVVPSLLA

SEQ ID NO: 36252 - protein, 8 aa, Artificial Sequence
  Peptide Derived from Human Papillomavirus
LDLYEADK

SEQ ID NO: 36253 - protein, 9 aa, Artificial Sequence
  Peptide Derived from Human Papillomavirus
LDNRTARTA

SEQ ID NO: 36254 - protein, 11 aa, Artificial Sequence
  Peptide Derived from Human Papillomavirus
LFCADPALDNR

SEQ ID NO: 36255 - protein, 10 aa, Artificial Sequence
  Peptide Derived from Human Papillomavirus
LIRMECALLY

SEQ ID NO: 36256 - protein, 8 aa, Artificial Sequence
  Peptide Derived from Human Papillomavirus
LLASKTKA

SEQ ID NO: 36257 - protein, 9 aa, Artificial Sequence
  Peptide Derived from Human Papillomavirus
LLASKTKAF

SEQ ID NO: 36258 - protein, 10 aa, Artificial Sequence
  Peptide Derived from Human Papillomavirus
LLYTAKQMGF

SEQ ID NO: 36259 - protein, 10 aa, Artificial Sequence
  Peptide Derived from Human Papillomavirus
LTKLFCADPA

SEQ ID NO: 36260 - protein, 8 aa, Artificial Sequence
  Peptide Derived from Human Papillomavirus
MALETLSK

SEQ ID NO: 36261 - protein, 11 aa, Artificial Sequence
  Peptide Derived from Human Papillomavirus
MALETLSKSQY

SEQ ID NO: 36262 - protein, 10 aa, Artificial Sequence
  Peptide Derived from Human Papillomavirus
MDYTNWGEIY

SEQ ID NO: 36263 - protein, 8 aa, Artificial Sequence
  Peptide Derived from Human Papillomavirus
MGFSHLCH

SEQ ID NO: 36264 - protein, 8 aa, Artificial Sequence
  Peptide Derived from Human Papillomavirus
MVTGKVDY

SEQ ID NO: 36265 - protein, 11 aa, Artificial Sequence
  Peptide Derived from Human Papillomavirus
NAVQEKILDLY

SEQ ID NO: 36266 - protein, 8 aa, Artificial Sequence
  Peptide Derived from Human Papillomavirus
NCEKVYFK

SEQ ID NO: 36267 - protein, 9 aa, Artificial Sequence
  Peptide Derived from Human Papillomavirus
NCEKVYFKY

SEQ ID NO: 36268 - protein, 10 aa, Artificial Sequence
  Peptide Derived from Human Papillomavirus
NCEKVYFKYF

SEQ ID NO: 36269 - protein, 11 aa, Artificial Sequence
  Peptide Derived from Human Papillomavirus
NCEKVYFKYFK

SEQ ID NO: 36270 - protein, 9 aa, Artificial Sequence
  Peptide Derived from Human Papillomavirus
NDKKNTMDY

SEQ ID NO: 36271 - protein, 8 aa, Artificial Sequence
  Peptide Derived from Human Papillomavirus
NDNRPPQA

SEQ ID NO: 36272 - protein, 9 aa, Artificial Sequence
  Peptide Derived from Human Papillomavirus
NDNRPPQAA

SEQ ID NO: 36273 - protein, 10 aa, Artificial Sequence
  Peptide Derived from Human Papillomavirus
NDNRPPQAAA

SEQ ID NO: 36274 - protein, 11 aa, Artificial Sequence
  Peptide Derived from Human Papillomavirus
NDNRPPQAAAK

SEQ ID NO: 36275 - protein, 8 aa, Artificial Sequence
  Peptide Derived from Human Papillomavirus
NGIVTVTF

SEQ ID NO: 36276 - protein, 11 aa, Artificial Sequence
  Peptide Derived from Human Papillomavirus
NSKNGIVTVTF

SEQ ID NO: 36277 - protein, 8 aa, Artificial Sequence
  Peptide Derived from Human Papillomavirus
NSLKCLRY

SEQ ID NO: 36278 - protein, 9 aa, Artificial Sequence
  Peptide Derived from Human Papillomavirus
NSLKCLRYR

SEQ ID NO: 36279 - protein, 11 aa, Artificial Sequence
  Peptide Derived from Human Papillomavirus
NSLKCLRYRLK

SEQ ID NO: 36280 - protein, 9 aa, Artificial Sequence
  Peptide Derived from Human Papillomavirus
NVAPIVHLK

SEQ ID NO: 36281 - protein, 8 aa, Artificial Sequence
  Peptide Derived from Human Papillomavirus
PADTTDTA

SEQ ID NO: 36282 - protein, 8 aa, Artificial Sequence
  Peptide Derived from Human Papillomavirus
PALDNRTA

SEQ ID NO: 36283 - protein, 9 aa, Artificial Sequence
  Peptide Derived from Human Papillomavirus
PALDNRTAR

SEQ ID NO: 36284 - protein, 11 aa, Artificial Sequence
  Peptide Derived from Human Papillomavirus
PALDNRTARTA

SEQ ID NO: 36285 - protein, 8 aa, Artificial Sequence
  Peptide Derived from Human Papillomavirus
PLTKLFCA

SEQ ID NO: 36286 - protein, 11 aa, Artificial Sequence
  Peptide Derived from Human Papillomavirus
PLTKLFCADPA

SEQ ID NO: 36287 - protein, 9 aa, Artificial Sequence
  Peptide Derived from Human Papillomavirus
PSLLASKTK

SEQ ID NO: 36288 - protein, 10 aa, Artificial Sequence
  Peptide Derived from Human Papillomavirus
PSLLASKTKA

SEQ ID NO: 36289 - protein, 11 aa, Artificial Sequence
  Peptide Derived from Human Papillomavirus
PSLLASKTKAF

SEQ ID NO: 36290 - protein, 8 aa, Artificial Sequence
  Peptide Derived from Human Papillomavirus
PSQIEHWK

SEQ ID NO: 36291 - protein, 11 aa, Artificial Sequence
  Peptide Derived from Human Papillomavirus
PSQIEHWKLIR

SEQ ID NO: 36292 - protein, 9 aa, Artificial Sequence
  Peptide Derived from Human Papillomavirus
PTVQISTGF

SEQ ID NO: 36293 - protein, 8 aa, Artificial Sequence
  Peptide Derived from Human Papillomavirus
QAAAKRRR

SEQ ID NO: 36294 - protein, 10 aa, Artificial Sequence
  Peptide Derived from Human Papillomavirus
QAAAKRRRPA

SEQ ID NO: 36295 - protein, 9 aa, Artificial Sequence
  Peptide Derived from Human Papillomavirus
QGETVTVQY

SEQ ID NO: 36296 - protein, 9 aa, Artificial Sequence
  Peptide Derived from Human Papillomavirus
QIEHWKLIR

SEQ ID NO: 36297 - protein, 8 aa, Artificial Sequence
  Peptide Derived from Human Papillomavirus
QISTTETA

SEQ ID NO: 36298 - protein, 9 aa, Artificial Sequence
  Peptide Derived from Human Papillomavirus
QMALETLSK

SEQ ID NO: 36299 - protein, 8 aa, Artificial Sequence
  Peptide Derived from Human Papillomavirus
QMFLGTVK

SEQ ID NO: 36300 - protein, 9 aa, Artificial Sequence
  Peptide Derived from Human Papillomavirus
QMGFSHLCH

SEQ ID NO: 36301 - protein, 11 aa, Artificial Sequence
  Peptide Derived from Human Papillomavirus
QTDNDNRPPQA

SEQ ID NO: 36302 - protein, 8 aa, Artificial Sequence
  Peptide Derived from Human Papillomavirus
QVIELQMA

SEQ ID NO: 36303 - protein, 8 aa, Artificial Sequence
  Peptide Derived from Human Papillomavirus
QVVPSLLA

SEQ ID NO: 36304 - protein, 10 aa, Artificial Sequence
  Peptide Derived from Human Papillomavirus
QVVPSLLASK

SEQ ID NO: 36305 - protein, 9 aa, Artificial Sequence
  Peptide Derived from Human Papillomavirus
RLKPYKELY

SEQ ID NO: 36306 - protein, 8 aa, Artificial Sequence
  Peptide Derived from Human Papillomavirus
RLNAVQEK

SEQ ID NO: 36307 - protein, 8 aa, Artificial Sequence
  Peptide Derived from Human Papillomavirus
RMECALLY

SEQ ID NO: 36308 - protein, 10 aa, Artificial Sequence
  Peptide Derived from Human Papillomavirus
RMECALLYTA

SEQ ID NO: 36309 - protein, 11 aa, Artificial Sequence
  Peptide Derived from Human Papillomavirus
RMECALLYTAK

SEQ ID NO: 36310 - protein, 9 aa, Artificial Sequence
  Peptide Derived from Human Papillomavirus
RTATNCTNK

SEQ ID NO: 36311 - protein, 11 aa, Artificial Sequence
  Peptide Derived from Human Papillomavirus
RTATNCTNKQR

SEQ ID NO: 36312 - protein, 9 aa, Artificial Sequence
  Peptide Derived from Human Papillomavirus
RTVCSSNVA

SEQ ID NO: 36313 - protein, 10 aa, Artificial Sequence
  Peptide Derived from Human Papillomavirus
SARLNAVQEK

SEQ ID NO: 36314 - protein, 11 aa, Artificial Sequence
  Peptide Derived from Human Papillomavirus
SLEVWLCEPPK

SEQ ID NO: 36315 - protein, 8 aa, Artificial Sequence
  Peptide Derived from Human Papillomavirus
SLKCLRYR

SEQ ID NO: 36316 - protein, 10 aa, Artificial Sequence
  Peptide Derived from Human Papillomavirus
SLKCLRYRLK

SEQ ID NO: 36317 - protein, 8 aa, Artificial Sequence
  Peptide Derived from Human Papillomavirus
SLLASKTK

SEQ ID NO: 36318 - protein, 9 aa, Artificial Sequence
  Peptide Derived from Human Papillomavirus
SLLASKTKA

SEQ ID NO: 36319 - protein, 10 aa, Artificial Sequence
  Peptide Derived from Human Papillomavirus
SLLASKTKAF

SEQ ID NO: 36320 - protein, 8 aa, Artificial Sequence
  Peptide Derived from Human Papillomavirus
SSMSSTWH

SEQ ID NO: 36321 - protein, 11 aa, Artificial Sequence
  Peptide Derived from Human Papillomavirus
SSNQISTTETA

SEQ ID NO: 36322 - protein, 9 aa, Artificial Sequence
  Peptide Derived from Human Papillomavirus
SSNVAPIVH

SEQ ID NO: 36323 - protein, 11 aa, Artificial Sequence
  Peptide Derived from Human Papillomavirus
SSNVAPIVHLK

SEQ ID NO: 36324 - protein, 11 aa, Artificial Sequence
  Peptide Derived from Human Papillomavirus
SSTWHWTSDNK

SEQ ID NO: 36325 - protein, 10 aa, Artificial Sequence
  Peptide Derived from Human Papillomavirus
STWHWTSDNK

SEQ ID NO: 36326 - protein, 11 aa, Artificial Sequence
  Peptide Derived from Human Papillomavirus
TADIQTDNDNR

SEQ ID NO: 36327 - protein, 9 aa, Artificial Sequence
  Peptide Derived from Human Papillomavirus
TAKQMGFSH

SEQ ID NO: 36328 - protein, 9 aa, Artificial Sequence
  Peptide Derived from Human Papillomavirus
TAQPLTKLF

SEQ ID NO: 36329 - protein, 11 aa, Artificial Sequence
  Peptide Derived from Human Papillomavirus
TAQPLTKLFCA

SEQ ID NO: 36330 - protein, 11 aa, Artificial Sequence
  Peptide Derived from Human Papillomavirus
TARTATNCTNK

SEQ ID NO: 36331 - protein, 8 aa, Artificial Sequence
  Peptide Derived from Human Papillomavirus
TATNCTNK

SEQ ID NO: 36332 - protein, 10 aa, Artificial Sequence
  Peptide Derived from Human Papillomavirus
TATNCTNKQR

SEQ ID NO: 36333 - protein, 8 aa, Artificial Sequence
  Peptide Derived from Human Papillomavirus
TCTMVTGK

SEQ ID NO: 36334 - protein, 11 aa, Artificial Sequence
  Peptide Derived from Human Papillomavirus
TCTMVTGKVDY

SEQ ID NO: 36335 - protein, 9 aa, Artificial Sequence
  Peptide Derived from Human Papillomavirus
TDLPSQIEH

SEQ ID NO: 36336 - protein, 11 aa, Artificial Sequence
  Peptide Derived from Human Papillomavirus
TDLPSQIEHWK

SEQ ID NO: 36337 - protein, 10 aa, Artificial Sequence
  Peptide Derived from Human Papillomavirus
TDNDNRPPQA

SEQ ID NO: 36338 - protein, 11 aa, Artificial Sequence
  Peptide Derived from Human Papillomavirus
TDNDNRPPQAA

SEQ ID NO: 36339 - protein, 9 aa, Artificial Sequence
  Peptide Derived from Human Papillomavirus
TDTAQPLTK

SEQ ID NO: 36340 - protein, 11 aa, Artificial Sequence
  Peptide Derived from Human Papillomavirus
TDTAQPLTKLF

SEQ ID NO: 36341 - protein, 11 aa, Artificial Sequence
  Peptide Derived from Human Papillomavirus
TFVTEQQQQMF

SEQ ID NO: 36342 - protein, 10 aa, Artificial Sequence
  Peptide Derived from Human Papillomavirus
TGKVDYIGMY

SEQ ID NO: 36343 - protein, 11 aa, Artificial Sequence
  Peptide Derived from Human Papillomavirus
TGKVDYIGMYY

SEQ ID NO: 36344 - protein, 11 aa, Artificial Sequence
  Peptide Derived from Human Papillomavirus
TMDYTNWGEIY

SEQ ID NO: 36345 - protein, 9 aa, Artificial Sequence
  Peptide Derived from Human Papillomavirus
TMVTGKVDY

SEQ ID NO: 36346 - protein, 8 aa, Artificial Sequence
  Peptide Derived from Human Papillomavirus
TSDNKNSK

SEQ ID NO: 36347 - protein, 10 aa, Artificial Sequence
  Peptide Derived from Human Papillomavirus
TTDTAQPLTK

SEQ ID NO: 36348 - protein, 8 aa, Artificial Sequence
  Peptide Derived from Human Papillomavirus
TVCSSNVA

SEQ ID NO: 36349 - protein, 8 aa, Artificial Sequence
  Peptide Derived from Human Papillomavirus
TVQISTGF

SEQ ID NO: 36350 - protein, 8 aa, Artificial Sequence
  Peptide Derived from Human Papillomavirus
TVQYDNDK

SEQ ID NO: 36351 - protein, 9 aa, Artificial Sequence
  Peptide Derived from Human Papillomavirus
TVQYDNDKK

SEQ ID NO: 36352 - protein, 10 aa, Artificial Sequence
  Peptide Derived from Human Papillomavirus
TVTVQYDNDK

SEQ ID NO: 36353 - protein, 11 aa, Artificial Sequence
  Peptide Derived from Human Papillomavirus
TVTVQYDNDKK

SEQ ID NO: 36354 - protein, 8 aa, Artificial Sequence
  Peptide Derived from Human Papillomavirus
VAPIVHLK

SEQ ID NO: 36355 - protein, 11 aa, Artificial Sequence
  Peptide Derived from Human Papillomavirus
VCSSNVAPIVH

SEQ ID NO: 36356 - protein, 8 aa, Artificial Sequence
  Peptide Derived from Human Papillomavirus
VDYIGMYY

SEQ ID NO: 36357 - protein, 10 aa, Artificial Sequence
  Peptide Derived from Human Papillomavirus
VDYIGMYYIH

SEQ ID NO: 36358 - protein, 9 aa, Artificial Sequence
  Peptide Derived from Human Papillomavirus
VTEQQQQMF

SEQ ID NO: 36359 - protein, 11 aa, Artificial Sequence
  Peptide Derived from Human Papillomavirus
VTGKVDYIGMY

SEQ ID NO: 36360 - protein, 9 aa, Artificial Sequence
  Peptide Derived from Human Papillomavirus
VTVQYDNDK

SEQ ID NO: 36361 - protein, 10 aa, Artificial Sequence
  Peptide Derived from Human Papillomavirus
VTVQYDNDKK

SEQ ID NO: 36362 - protein, 9 aa, Artificial Sequence
  Peptide Derived from Human Papillomavirus
VVPSLLASK

SEQ ID NO: 36363 - protein, 11 aa, Artificial Sequence
  Peptide Derived from Human Papillomavirus
VVPSLLASKTK

SEQ ID NO: 36364 - protein, 9 aa, Artificial Sequence
  Peptide Derived from Human Papillomavirus
WLCEPPKCF

SEQ ID NO: 36365 - protein, 10 aa, Artificial Sequence
  Peptide Derived from Human Papillomavirus
WLCEPPKCFK

SEQ ID NO: 36366 - protein, 11 aa, Artificial Sequence
  Peptide Derived from Human Papillomavirus
WLCEPPKCFKK

SEQ ID NO: 36367 - protein, 9 aa, Artificial Sequence
  Peptide Derived from Human Papillomavirus
WTSDNKNSK

SEQ ID NO: 36368 - protein, 11 aa, Artificial Sequence
  Peptide Derived from Human Papillomavirus
YDNDKKNTMDY

SEQ ID NO: 36369 - protein, 8 aa, Artificial Sequence
  Peptide Derived from Human Papillomavirus
YFKEDAAK

SEQ ID NO: 36370 - protein, 9 aa, Artificial Sequence
  Peptide Derived from Human Papillomavirus
YFKEDAAKY

SEQ ID NO: 36371 - protein, 11 aa, Artificial Sequence
  Peptide Derived from Human Papillomavirus
YFKEDAAKYSK

SEQ ID NO: 36372 - protein, 9 aa, Artificial Sequence
  Peptide Derived from Human Papillomavirus
YFKYFKEDA

SEQ ID NO: 36373 - protein, 10 aa, Artificial Sequence
  Peptide Derived from Human Papillomavirus
YFKYFKEDAA

SEQ ID NO: 36374 - protein, 11 aa, Artificial Sequence
  Peptide Derived from Human Papillomavirus
YFKYFKEDAAK

SEQ ID NO: 36375 - protein, 8 aa, Artificial Sequence
  Peptide Derived from Human Papillomavirus
YIGMYYIH

SEQ ID NO: 36376 - protein, 9 aa, Artificial Sequence
  Peptide Derived from Human Papillomavirus
YIHNCEKVY

SEQ ID NO: 36377 - protein, 10 aa, Artificial Sequence
  Peptide Derived from Human Papillomavirus
YIHNCEKVYF

SEQ ID NO: 36378 - protein, 11 aa, Artificial Sequence
  Peptide Derived from Human Papillomavirus
YIHNCEKVYFK

SEQ ID NO: 36379 - protein, 10 aa, Artificial Sequence
  Peptide Derived from Human Papillomavirus
YSKTQMWEVH

SEQ ID NO: 36380 - protein, 9 aa, Artificial Sequence
  Peptide Derived from Human Papillomavirus
YSSMSSTWH

SEQ ID NO: 36381 - protein, 8 aa, Artificial Sequence
  Peptide Derived from Human Papillomavirus
YTAKQMGF

SEQ ID NO: 36382 - protein, 10 aa, Artificial Sequence
  Peptide Derived from Human Papillomavirus
YTAKQMGFSH

SEQ ID NO: 36383 - protein, 8 aa, Artificial Sequence
  Peptide Derived from Human Papillomavirus
YTNWGEIY

SEQ ID NO: 36384 - protein, 8 aa, Artificial Sequence
  Peptide Derived from Human Papillomavirus
CINFHAQH

SEQ ID NO: 36385 - protein, 8 aa, Artificial Sequence
  Peptide Derived from Human Papillomavirus
FCYLLFLY

SEQ ID NO: 36386 - protein, 9 aa, Artificial Sequence
  Peptide Derived from Human Papillomavirus
FFCYLLFLY

SEQ ID NO: 36387 - protein, 9 aa, Artificial Sequence
  Peptide Derived from Human Papillomavirus
FLCLSLLLR

SEQ ID NO: 36388 - protein, 11 aa, Artificial Sequence
  Peptide Derived from Human Papillomavirus
FLYLPMMCINF

SEQ ID NO: 36389 - protein, 10 aa, Artificial Sequence
  Peptide Derived from Human Papillomavirus
FVFVLCFILF

SEQ ID NO: 36390 - protein, 9 aa, Artificial Sequence
  Peptide Derived from Human Papillomavirus
FVGSPLKIF

SEQ ID NO: 36391 - protein, 10 aa, Artificial Sequence
  Peptide Derived from Human Papillomavirus
FVGSPLKIFF

SEQ ID NO: 36392 - protein, 8 aa, Artificial Sequence
  Peptide Derived from Human Papillomavirus
FVLCFILF

SEQ ID NO: 36393 - protein, 8 aa, Artificial Sequence
  Peptide Derived from Human Papillomavirus
GSPLKIFF

SEQ ID NO: 36394 - protein, 10 aa, Artificial Sequence
  Peptide Derived from Human Papillomavirus
GSPLKIFFCY

SEQ ID NO: 36395 - protein, 8 aa, Artificial Sequence
  Peptide Derived from Human Papillomavirus
IFFCYLLF

SEQ ID NO: 36396 - protein, 10 aa, Artificial Sequence
  Peptide Derived from Human Papillomavirus
IFFCYLLFLY

SEQ ID NO: 36397 - protein, 8 aa, Artificial Sequence
  Peptide Derived from Human Papillomavirus
IFVFVLCF

SEQ ID NO: 36398 - protein, 11 aa, Artificial Sequence
  Peptide Derived from Human Papillomavirus
IFVFVLCFILF

SEQ ID NO: 36399 - protein, 11 aa, Artificial Sequence
  Peptide Derived from Human Papillomavirus
ILFLCLSLLLR

SEQ ID NO: 36400 - protein, 8 aa, Artificial Sequence
  Peptide Derived from Human Papillomavirus
ILSISTYA

SEQ ID NO: 36401 - protein, 9 aa, Artificial Sequence
  Peptide Derived from Human Papillomavirus
KIFFCYLLF

SEQ ID NO: 36402 - protein, 11 aa, Artificial Sequence
  Peptide Derived from Human Papillomavirus
KIFFCYLLFLY

SEQ ID NO: 36403 - protein, 8 aa, Artificial Sequence
  Peptide Derived from Human Papillomavirus
LCLSLLLR

SEQ ID NO: 36404 - protein, 10 aa, Artificial Sequence
  Peptide Derived from Human Papillomavirus
LFLCLSLLLR

SEQ ID NO: 36405 - protein, 8 aa, Artificial Sequence
  Peptide Derived from Human Papillomavirus
LILSISTY

SEQ ID NO: 36406 - protein, 9 aa, Artificial Sequence
  Peptide Derived from Human Papillomavirus
LILSISTYA

SEQ ID NO: 36407 - protein, 11 aa, Artificial Sequence
  Peptide Derived from Human Papillomavirus
LLVLVLLLWVF

SEQ ID NO: 36408 - protein, 11 aa, Artificial Sequence
  Peptide Derived from Human Papillomavirus
LLWVFVGSPLK

SEQ ID NO: 36409 - protein, 8 aa, Artificial Sequence
  Peptide Derived from Human Papillomavirus
LVLLLWVF

SEQ ID NO: 36410 - protein, 10 aa, Artificial Sequence
  Peptide Derived from Human Papillomavirus
LVLVLLLWVF

SEQ ID NO: 36411 - protein, 9 aa, Artificial Sequence
  Peptide Derived from Human Papillomavirus
MCINFHAQH

SEQ ID NO: 36412 - protein, 9 aa, Artificial Sequence
  Peptide Derived from Human Papillomavirus
MIFVFVLCF

SEQ ID NO: 36413 - protein, 8 aa, Artificial Sequence
  Peptide Derived from Human Papillomavirus
MMCINFHA

SEQ ID NO: 36414 - protein, 10 aa, Artificial Sequence
  Peptide Derived from Human Papillomavirus
MMCINFHAQH

SEQ ID NO: 36415 - protein, 9 aa, Artificial Sequence
  Peptide Derived from Human Papillomavirus
PLILSISTY

SEQ ID NO: 36416 - protein, 10 aa, Artificial Sequence
  Peptide Derived from Human Papillomavirus
PLILSISTYA

SEQ ID NO: 36417 - protein, 8 aa, Artificial Sequence
  Peptide Derived from Human Papillomavirus
PLKIFFCY

SEQ ID NO: 36418 - protein, 11 aa, Artificial Sequence
  Peptide Derived from Human Papillomavirus
PLKIFFCYLLF

SEQ ID NO: 36419 - protein, 8 aa, Artificial Sequence
  Peptide Derived from Human Papillomavirus
PMMCINFH

SEQ ID NO: 36420 - protein, 9 aa, Artificial Sequence
  Peptide Derived from Human Papillomavirus
PMMCINFHA

SEQ ID NO: 36421 - protein, 11 aa, Artificial Sequence
  Peptide Derived from Human Papillomavirus
PMMCINFHAQH

SEQ ID NO: 36422 - protein, 8 aa, Artificial Sequence
  Peptide Derived from Human Papillomavirus
VFVGSPLK

SEQ ID NO: 36423 - protein, 10 aa, Artificial Sequence
  Peptide Derived from Human Papillomavirus
VFVGSPLKIF

SEQ ID NO: 36424 - protein, 11 aa, Artificial Sequence
  Peptide Derived from Human Papillomavirus
VFVGSPLKIFF

SEQ ID NO: 36425 - protein, 9 aa, Artificial Sequence
  Peptide Derived from Human Papillomavirus
VFVLCFILF

SEQ ID NO: 36426 - protein, 8 aa, Artificial Sequence
  Peptide Derived from Human Papillomavirus
VGSPLKIF

SEQ ID NO: 36427 - protein, 9 aa, Artificial Sequence
  Peptide Derived from Human Papillomavirus
VGSPLKIFF

SEQ ID NO: 36428 - protein, 11 aa, Artificial Sequence
  Peptide Derived from Human Papillomavirus
VGSPLKIFFCY

SEQ ID NO: 36429 - protein, 9 aa, Artificial Sequence
  Peptide Derived from Human Papillomavirus
VLVLLLWVF

SEQ ID NO: 36430 - protein, 9 aa, Artificial Sequence
  Peptide Derived from Human Papillomavirus
WVFVGSPLK

SEQ ID NO: 36431 - protein, 11 aa, Artificial Sequence
  Peptide Derived from Human Papillomavirus
WVFVGSPLKIF

SEQ ID NO: 36432 - protein, 9 aa, Artificial Sequence
  Peptide Derived from Human Papillomavirus
YLPMMCINF

SEQ ID NO: 36433 - protein, 10 aa, Artificial Sequence
  Peptide Derived from Human Papillomavirus
YLPMMCINFH

SEQ ID NO: 36434 - protein, 11 aa, Artificial Sequence
  Peptide Derived from Human Papillomavirus
YLPMMCINFHA

SEQ ID NO: 36435 - protein, 8 aa, Artificial Sequence
  Peptide Derived from Human Papillomavirus
AACWRSRR

SEQ ID NO: 36436 - protein, 9 aa, Artificial Sequence
  Peptide Derived from Human Papillomavirus
AACWRSRRR

SEQ ID NO: 36437 - protein, 8 aa, Artificial Sequence
  Peptide Derived from Human Papillomavirus
ACWRSRRR

SEQ ID NO: 36438 - protein, 11 aa, Artificial Sequence
  Peptide Derived from Human Papillomavirus
ACWRSRRRETA

SEQ ID NO: 36439 - protein, 8 aa, Artificial Sequence
  Peptide Derived from Human Papillomavirus
ADLTVVYR

SEQ ID NO: 36440 - protein, 9 aa, Artificial Sequence
  Peptide Derived from Human Papillomavirus
AFADLTVVY

SEQ ID NO: 36441 - protein, 10 aa, Artificial Sequence
  Peptide Derived from Human Papillomavirus
AFADLTVVYR

SEQ ID NO: 36442 - protein, 9 aa, Artificial Sequence
  Peptide Derived from Human Papillomavirus
AGRCAACWR

SEQ ID NO: 36443 - protein, 11 aa, Artificial Sequence
  Peptide Derived from Human Papillomavirus
AGRCAACWRSR

SEQ ID NO: 36444 - protein, 8 aa, Artificial Sequence
  Peptide Derived from Human Papillomavirus
CAACWRSR

SEQ ID NO: 36445 - protein, 9 aa, Artificial Sequence
  Peptide Derived from Human Papillomavirus
CAACWRSRR

SEQ ID NO: 36446 - protein, 10 aa, Artificial Sequence
  Peptide Derived from Human Papillomavirus
CAACWRSRRR

SEQ ID NO: 36447 - protein, 11 aa, Artificial Sequence
  Peptide Derived from Human Papillomavirus
CLRFLSKISEY

SEQ ID NO: 36448 - protein, 10 aa, Artificial Sequence
  Peptide Derived from Human Papillomavirus
CVECKKPLQR

SEQ ID NO: 36449 - protein, 11 aa, Artificial Sequence
  Peptide Derived from Human Papillomavirus
DFAFADLTVVY

SEQ ID NO: 36450 - protein, 11 aa, Artificial Sequence
  Peptide Derived from Human Papillomavirus
DLCQALETTIH

SEQ ID NO: 36451 - protein, 10 aa, Artificial Sequence
  Peptide Derived from Human Papillomavirus
DTEEKPRTLH

SEQ ID NO: 36452 - protein, 8 aa, Artificial Sequence
  Peptide Derived from Human Papillomavirus
ECKKPLQR

SEQ ID NO: 36453 - protein, 9 aa, Artificial Sequence
  Peptide Derived from Human Papillomavirus
EGNPFGICK

SEQ ID NO: 36454 - protein, 11 aa, Artificial Sequence
  Peptide Derived from Human Papillomavirus
EILIRCIICQR

SEQ ID NO: 36455 - protein, 8 aa, Artificial Sequence
  Peptide Derived from Human Papillomavirus
ELQCVECK

SEQ ID NO: 36456 - protein, 9 aa, Artificial Sequence
  Peptide Derived from Human Papillomavirus
ELQCVECKK

SEQ ID NO: 36457 - protein, 8 aa, Artificial Sequence
  Peptide Derived from Human Papillomavirus
EVYDFAFA

SEQ ID NO: 36458 - protein, 8 aa, Artificial Sequence
  Peptide Derived from Human Papillomavirus
FADLTVVY

SEQ ID NO: 36459 - protein, 9 aa, Artificial Sequence
  Peptide Derived from Human Papillomavirus
FADLTVVYR

SEQ ID NO: 36460 - protein, 10 aa, Artificial Sequence
  Peptide Derived from Human Papillomavirus
FAFADLTVVY

SEQ ID NO: 36461 - protein, 11 aa, Artificial Sequence
  Peptide Derived from Human Papillomavirus
FAFADLTVVYR

SEQ ID NO: 36462 - protein, 9 aa, Artificial Sequence
  Peptide Derived from Human Papillomavirus
FGICKLCLR

SEQ ID NO: 36463 - protein, 10 aa, Artificial Sequence
  Peptide Derived from Human Papillomavirus
FGICKLCLRF

SEQ ID NO: 36464 - protein, 8 aa, Artificial Sequence
  Peptide Derived from Human Papillomavirus
FLSKISEY

SEQ ID NO: 36465 - protein, 9 aa, Artificial Sequence
  Peptide Derived from Human Papillomavirus
FLSKISEYR

SEQ ID NO: 36466 - protein, 10 aa, Artificial Sequence
  Peptide Derived from Human Papillomavirus
FLSKISEYRH

SEQ ID NO: 36467 - protein, 11 aa, Artificial Sequence
  Peptide Derived from Human Papillomavirus
FLSKISEYRHY

SEQ ID NO: 36468 - protein, 8 aa, Artificial Sequence
  Peptide Derived from Human Papillomavirus
GICKLCLR

SEQ ID NO: 36469 - protein, 9 aa, Artificial Sequence
  Peptide Derived from Human Papillomavirus
GICKLCLRF

SEQ ID NO: 36470 - protein, 8 aa, Artificial Sequence
  Peptide Derived from Human Papillomavirus
HVDLNKRF

SEQ ID NO: 36471 - protein, 9 aa, Artificial Sequence
  Peptide Derived from Human Papillomavirus
HVDLNKRFH

SEQ ID NO: 36472 - protein, 8 aa, Artificial Sequence
  Peptide Derived from Human Papillomavirus
ICKLCLRF

SEQ ID NO: 36473 - protein, 11 aa, Artificial Sequence
  Peptide Derived from Human Papillomavirus
ICKLCLRFLSK

SEQ ID NO: 36474 - protein, 11 aa, Artificial Sequence
  Peptide Derived from Human Papillomavirus
ICQRPLCPQEK

SEQ ID NO: 36475 - protein, 10 aa, Artificial Sequence
  Peptide Derived from Human Papillomavirus
ILIRCIICQR

SEQ ID NO: 36476 - protein, 9 aa, Artificial Sequence
  Peptide Derived from Human Papillomavirus
ISEYRHYNY

SEQ ID NO: 36477 - protein, 8 aa, Artificial Sequence
  Peptide Derived from Human Papillomavirus
ISGRWAGR

SEQ ID NO: 36478 - protein, 10 aa, Artificial Sequence
  Peptide Derived from Human Papillomavirus
ISGRWAGRCA

SEQ ID NO: 36479 - protein, 11 aa, Artificial Sequence
  Peptide Derived from Human Papillomavirus
ISGRWAGRCAA

SEQ ID NO: 36480 - protein, 8 aa, Artificial Sequence
  Peptide Derived from Human Papillomavirus
KISEYRHY

SEQ ID NO: 36481 - protein, 10 aa, Artificial Sequence
  Peptide Derived from Human Papillomavirus
KISEYRHYNY

SEQ ID NO: 36482 - protein, 9 aa, Artificial Sequence
  Peptide Derived from Human Papillomavirus
KLCLRFLSK

SEQ ID NO: 36483 - protein, 8 aa, Artificial Sequence
  Peptide Derived from Human Papillomavirus
LCLRFLSK

SEQ ID NO: 36484 - protein, 8 aa, Artificial Sequence
  Peptide Derived from Human Papillomavirus
LCPQEKKR

SEQ ID NO: 36485 - protein, 9 aa, Artificial Sequence
  Peptide Derived from Human Papillomavirus
LCPQEKKRH

SEQ ID NO: 36486 - protein, 10 aa, Artificial Sequence
  Peptide Derived from Human Papillomavirus
LCQALETTIH

SEQ ID NO: 36487 - protein, 9 aa, Artificial Sequence
  Peptide Derived from Human Papillomavirus
LIRCIICQR

SEQ ID NO: 36488 - protein, 8 aa, Artificial Sequence
  Peptide Derived from Human Papillomavirus
LSKISEYR

SEQ ID NO: 36489 - protein, 9 aa, Artificial Sequence
  Peptide Derived from Human Papillomavirus
LSKISEYRH

SEQ ID NO: 36490 - protein, 10 aa, Artificial Sequence
  Peptide Derived from Human Papillomavirus
LSKISEYRHY

SEQ ID NO: 36491 - protein, 11 aa, Artificial Sequence
  Peptide Derived from Human Papillomavirus
LTVVYREGNPF

SEQ ID NO: 36492 - protein, 8 aa, Artificial Sequence
  Peptide Derived from Human Papillomavirus
MFQDTEEK

SEQ ID NO: 36493 - protein, 10 aa, Artificial Sequence
  Peptide Derived from Human Papillomavirus
MFQDTEEKPR

SEQ ID NO: 36494 - protein, 10 aa, Artificial Sequence
  Peptide Derived from Human Papillomavirus
NIELQCVECK

SEQ ID NO: 36495 - protein, 11 aa, Artificial Sequence
  Peptide Derived from Human Papillomavirus
NIELQCVECKK

SEQ ID NO: 36496 - protein, 9 aa, Artificial Sequence
  Peptide Derived from Human Papillomavirus
NISGRWAGR

SEQ ID NO: 36497 - protein, 11 aa, Artificial Sequence
  Peptide Derived from Human Papillomavirus
NISGRWAGRCA

SEQ ID NO: 36498 - protein, 8 aa, Artificial Sequence
  Peptide Derived from Human Papillomavirus
NTLEQTVK

SEQ ID NO: 36499 - protein, 9 aa, Artificial Sequence
  Peptide Derived from Human Papillomavirus
NTLEQTVKK

SEQ ID NO: 36500 - protein, 10 aa, Artificial Sequence
  Peptide Derived from Human Papillomavirus
PFGICKLCLR

SEQ ID NO: 36501 - protein, 11 aa, Artificial Sequence
  Peptide Derived from Human Papillomavirus
PFGICKLCLRF

SEQ ID NO: 36502 - protein, 8 aa, Artificial Sequence
  Peptide Derived from Human Papillomavirus
PLCPQEKK

SEQ ID NO: 36503 - protein, 9 aa, Artificial Sequence
  Peptide Derived from Human Papillomavirus
PLCPQEKKR

SEQ ID NO: 36504 - protein, 10 aa, Artificial Sequence
  Peptide Derived from Human Papillomavirus
PLCPQEKKRH

SEQ ID NO: 36505 - protein, 8 aa, Artificial Sequence
  Peptide Derived from Human Papillomavirus
PLNEILIR

SEQ ID NO: 36506 - protein, 8 aa, Artificial Sequence
  Peptide Derived from Human Papillomavirus
PLQRSEVY

SEQ ID NO: 36507 - protein, 10 aa, Artificial Sequence
  Peptide Derived from Human Papillomavirus
PLQRSEVYDF

SEQ ID NO: 36508 - protein, 11 aa, Artificial Sequence
  Peptide Derived from Human Papillomavirus
PLQRSEVYDFA

SEQ ID NO: 36509 - protein, 8 aa, Artificial Sequence
  Peptide Derived from Human Papillomavirus
QALETTIH

SEQ ID NO: 36510 - protein, 11 aa, Artificial Sequence
  Peptide Derived from Human Papillomavirus
QCVECKKPLQR

SEQ ID NO: 36511 - protein, 8 aa, Artificial Sequence
  Peptide Derived from Human Papillomavirus
QDTEEKPR

SEQ ID NO: 36512 - protein, 11 aa, Artificial Sequence
  Peptide Derived from Human Papillomavirus
QDTEEKPRTLH

SEQ ID NO: 36513 - protein, 9 aa, Artificial Sequence
  Peptide Derived from Human Papillomavirus
RCAACWRSR

SEQ ID NO: 36514 - protein, 10 aa, Artificial Sequence
  Peptide Derived from Human Papillomavirus
RCAACWRSRR

SEQ ID NO: 36515 - protein, 11 aa, Artificial Sequence
  Peptide Derived from Human Papillomavirus
RCAACWRSRRR

SEQ ID NO: 36516 - protein, 8 aa, Artificial Sequence
  Peptide Derived from Human Papillomavirus
RFHNISGR

SEQ ID NO: 36517 - protein, 10 aa, Artificial Sequence
  Peptide Derived from Human Papillomavirus
RFHNISGRWA

SEQ ID NO: 36518 - protein, 9 aa, Artificial Sequence
  Peptide Derived from Human Papillomavirus
RFLSKISEY

SEQ ID NO: 36519 - protein, 10 aa, Artificial Sequence
  Peptide Derived from Human Papillomavirus
RFLSKISEYR

SEQ ID NO: 36520 - protein, 11 aa, Artificial Sequence
  Peptide Derived from Human Papillomavirus
RFLSKISEYRH

SEQ ID NO: 36521 - protein, 8 aa, Artificial Sequence
  Peptide Derived from Human Papillomavirus
RSEVYDFA

SEQ ID NO: 36522 - protein, 9 aa, Artificial Sequence
  Peptide Derived from Human Papillomavirus
RSEVYDFAF

SEQ ID NO: 36523 - protein, 10 aa, Artificial Sequence
  Peptide Derived from Human Papillomavirus
RSEVYDFAFA

SEQ ID NO: 36524 - protein, 8 aa, Artificial Sequence
  Peptide Derived from Human Papillomavirus
RSRRRETA

SEQ ID NO: 36525 - protein, 9 aa, Artificial Sequence
  Peptide Derived from Human Papillomavirus
RTLHDLCQA

SEQ ID NO: 36526 - protein, 9 aa, Artificial Sequence
  Peptide Derived from Human Papillomavirus
SGRWAGRCA

SEQ ID NO: 36527 - protein, 10 aa, Artificial Sequence
  Peptide Derived from Human Papillomavirus
SGRWAGRCAA

SEQ ID NO: 36528 - protein, 8 aa, Artificial Sequence
  Peptide Derived from Human Papillomavirus
TLEQTVKK

SEQ ID NO: 36529 - protein, 8 aa, Artificial Sequence
  Peptide Derived from Human Papillomavirus
TLHDLCQA

SEQ ID NO: 36530 - protein, 10 aa, Artificial Sequence
  Peptide Derived from Human Papillomavirus
TVVYREGNPF

SEQ ID NO: 36531 - protein, 8 aa, Artificial Sequence
  Peptide Derived from Human Papillomavirus
VDLNKRFH

SEQ ID NO: 36532 - protein, 9 aa, Artificial Sequence
  Peptide Derived from Human Papillomavirus
VVYREGNPF

SEQ ID NO: 36533 - protein, 10 aa, Artificial Sequence
  Peptide Derived from Human Papillomavirus
WAGRCAACWR

SEQ ID NO: 36534 - protein, 10 aa, Artificial Sequence
  Peptide Derived from Human Papillomavirus
YGNTLEQTVK

SEQ ID NO: 36535 - protein, 11 aa, Artificial Sequence
  Peptide Derived from Human Papillomavirus
YGNTLEQTVKK

SEQ ID NO: 36536 - protein, 10 aa, Artificial Sequence
  Peptide Derived from Human Papillomavirus
ADYYIVTCCH

SEQ ID NO: 36537 - protein, 10 aa, Artificial Sequence
  Peptide Derived from Human Papillomavirus
CCHTCNTTVR

SEQ ID NO: 36538 - protein, 10 aa, Artificial Sequence
  Peptide Derived from Human Papillomavirus
CVNSTASDLR

SEQ ID NO: 36539 - protein, 9 aa, Artificial Sequence
  Peptide Derived from Human Papillomavirus
DGQAQPATA

SEQ ID NO: 36540 - protein, 11 aa, Artificial Sequence
  Peptide Derived from Human Papillomavirus
DGQAQPATADY

SEQ ID NO: 36541 - protein, 10 aa, Artificial Sequence
  Peptide Derived from Human Papillomavirus
DLYPEPTDLY

SEQ ID NO: 36542 - protein, 11 aa, Artificial Sequence
  Peptide Derived from Human Papillomavirus
DSSDEDEGLDR

SEQ ID NO: 36543 - protein, 10 aa, Artificial Sequence
  Peptide Derived from Human Papillomavirus
EGLDRPDGQA

SEQ ID NO: 36544 - protein, 9 aa, Artificial Sequence
  Peptide Derived from Human Papillomavirus
GLDRPDGQA

SEQ ID NO: 36545 - protein, 11 aa, Artificial Sequence
  Peptide Derived from Human Papillomavirus
GTVNIVCPTCA

SEQ ID NO: 36546 - protein, 8 aa, Artificial Sequence
  Peptide Derived from Human Papillomavirus
HTCNTTVR

SEQ ID NO: 36547 - protein, 11 aa, Artificial Sequence
  Peptide Derived from Human Papillomavirus
LCVNSTASDLR

SEQ ID NO: 36548 - protein, 11 aa, Artificial Sequence
  Peptide Derived from Human Papillomavirus
LDLYPEPTDLY

SEQ ID NO: 36549 - protein, 8 aa, Artificial Sequence
  Peptide Derived from Human Papillomavirus
LDRPDGQA

SEQ ID NO: 36550 - protein, 11 aa, Artificial Sequence
  Peptide Derived from Human Papillomavirus
LDRPDGQAQPA

SEQ ID NO: 36551 - protein, 8 aa, Artificial Sequence
  Peptide Derived from Human Papillomavirus
NIVCPTCA

SEQ ID NO: 36552 - protein, 8 aa, Artificial Sequence
  Peptide Derived from Human Papillomavirus
NSTASDLR

SEQ ID NO: 36553 - protein, 8 aa, Artificial Sequence
  Peptide Derived from Human Papillomavirus
PDGQAQPA

SEQ ID NO: 36554 - protein, 10 aa, Artificial Sequence
  Peptide Derived from Human Papillomavirus
PDGQAQPATA

SEQ ID NO: 36555 - protein, 11 aa, Artificial Sequence
  Peptide Derived from Human Papillomavirus
PTLKEYVLDLY

SEQ ID NO: 36556 - protein, 9 aa, Artificial Sequence
  Peptide Derived from Human Papillomavirus
QAQPATADY

SEQ ID NO: 36557 - protein, 10 aa, Artificial Sequence
  Peptide Derived from Human Papillomavirus
QAQPATADYY

SEQ ID NO: 36558 - protein, 8 aa, Artificial Sequence
  Peptide Derived from Human Papillomavirus
RGHKPTLK

SEQ ID NO: 36559 - protein, 10 aa, Artificial Sequence
  Peptide Derived from Human Papillomavirus
RGHKPTLKEY

SEQ ID NO: 36560 - protein, 8 aa, Artificial Sequence
  Peptide Derived from Human Papillomavirus
RLCVNSTA

SEQ ID NO: 36561 - protein, 9 aa, Artificial Sequence
  Peptide Derived from Human Papillomavirus
SDEDEGLDR

SEQ ID NO: 36562 - protein, 10 aa, Artificial Sequence
  Peptide Derived from Human Papillomavirus
SSDEDEGLDR

SEQ ID NO: 36563 - protein, 11 aa, Artificial Sequence
  Peptide Derived from Human Papillomavirus
TADYYIVTCCH

SEQ ID NO: 36564 - protein, 11 aa, Artificial Sequence
  Peptide Derived from Human Papillomavirus
TCCHTCNTTVR

SEQ ID NO: 36565 - protein, 10 aa, Artificial Sequence
  Peptide Derived from Human Papillomavirus
TLKEYVLDLY

SEQ ID NO: 36566 - protein, 11 aa, Artificial Sequence
  Peptide Derived from Human Papillomavirus
TTVRLCVNSTA

SEQ ID NO: 36567 - protein, 10 aa, Artificial Sequence
  Peptide Derived from Human Papillomavirus
TVNIVCPTCA

SEQ ID NO: 36568 - protein, 10 aa, Artificial Sequence
  Peptide Derived from Human Papillomavirus
TVRLCVNSTA

SEQ ID NO: 36569 - protein, 11 aa, Artificial Sequence
  Peptide Derived from Human Papillomavirus
AAPTSTRTSSA

SEQ ID NO: 36570 - protein, 8 aa, Artificial Sequence
  Peptide Derived from Human Papillomavirus
ACTNAAPA

SEQ ID NO: 36571 - protein, 9 aa, Artificial Sequence
  Peptide Derived from Human Papillomavirus
ACVGLEIGR

SEQ ID NO: 36572 - protein, 10 aa, Artificial Sequence
  Peptide Derived from Human Papillomavirus
ADLDQFPLGR

SEQ ID NO: 36573 - protein, 11 aa, Artificial Sequence
  Peptide Derived from Human Papillomavirus
ADLDQFPLGRK

SEQ ID NO: 36574 - protein, 11 aa, Artificial Sequence
  Peptide Derived from Human Papillomavirus
ADNRECLSMDY

SEQ ID NO: 36575 - protein, 8 aa, Artificial Sequence
  Peptide Derived from Human Papillomavirus
AGLKAKPK

SEQ ID NO: 36576 - protein, 10 aa, Artificial Sequence
  Peptide Derived from Human Papillomavirus
AGLKAKPKLK

SEQ ID NO: 36577 - protein, 11 aa, Artificial Sequence
  Peptide Derived from Human Papillomavirus
AGLKAKPKLKR

SEQ ID NO: 36578 - protein, 8 aa, Artificial Sequence
  Peptide Derived from Human Papillomavirus
AGSSRLLA

SEQ ID NO: 36579 - protein, 11 aa, Artificial Sequence
  Peptide Derived from Human Papillomavirus
AGSSRLLAVGH

SEQ ID NO: 36580 - protein, 11 aa, Artificial Sequence
  Peptide Derived from Human Papillomavirus
AITCQKTVPPK

SEQ ID NO: 36581 - protein, 8 aa, Artificial Sequence
  Peptide Derived from Human Papillomavirus
ASIQSSAF

SEQ ID NO: 36582 - protein, 9 aa, Artificial Sequence
  Peptide Derived from Human Papillomavirus
ASIQSSAFF

SEQ ID NO: 36583 - protein, 8 aa, Artificial Sequence
  Peptide Derived from Human Papillomavirus
ASLQDTYR

SEQ ID NO: 36584 - protein, 9 aa, Artificial Sequence
  Peptide Derived from Human Papillomavirus
ASLQDTYRF

SEQ ID NO: 36585 - protein, 10 aa, Artificial Sequence
  Peptide Derived from Human Papillomavirus
AVGHPYFSIK

SEQ ID NO: 36586 - protein, 9 aa, Artificial Sequence
  Peptide Derived from Human Papillomavirus
AVPDDLYIK

SEQ ID NO: 36587 - protein, 10 aa, Artificial Sequence
  Peptide Derived from Human Papillomavirus
CGSTCKYPDY

SEQ ID NO: 36588 - protein, 9 aa, Artificial Sequence
  Peptide Derived from Human Papillomavirus
CMDFKTLQA

SEQ ID NO: 36589 - protein, 11 aa, Artificial Sequence
  Peptide Derived from Human Papillomavirus
CMDFKTLQANK

SEQ ID NO: 36590 - protein, 10 aa, Artificial Sequence
  Peptide Derived from Human Papillomavirus
CTQVTSDSTY

SEQ ID NO: 36591 - protein, 11 aa, Artificial Sequence
  Peptide Derived from Human Papillomavirus
CTQVTSDSTYK

SEQ ID NO: 36592 - protein, 8 aa, Artificial Sequence
  Peptide Derived from Human Papillomavirus
CVGLEIGR

SEQ ID NO: 36593 - protein, 8 aa, Artificial Sequence
  Peptide Derived from Human Papillomavirus
DDTETGNK

SEQ ID NO: 36594 - protein, 9 aa, Artificial Sequence
  Peptide Derived from Human Papillomavirus
DDTETGNKY

SEQ ID NO: 36595 - protein, 9 aa, Artificial Sequence
  Peptide Derived from Human Papillomavirus
DFKTLQANK

SEQ ID NO: 36596 - protein, 9 aa, Artificial Sequence
  Peptide Derived from Human Papillomavirus
DGDMVDTGF

SEQ ID NO: 36597 - protein, 8 aa, Artificial Sequence
  Peptide Derived from Human Papillomavirus
DICGSTCK

SEQ ID NO: 36598 - protein, 9 aa, Artificial Sequence
  Peptide Derived from Human Papillomavirus
DICGSTCKY

SEQ ID NO: 36599 - protein, 8 aa, Artificial Sequence
  Peptide Derived from Human Papillomavirus
DILEDWQF

SEQ ID NO: 36600 - protein, 9 aa, Artificial Sequence
  Peptide Derived from Human Papillomavirus
DLDQFPLGR

SEQ ID NO: 36601 - protein, 10 aa, Artificial Sequence
  Peptide Derived from Human Papillomavirus
DLDQFPLGRK

SEQ ID NO: 36602 - protein, 11 aa, Artificial Sequence
  Peptide Derived from Human Papillomavirus
DLDQFPLGRKF

SEQ ID NO: 36603 - protein, 8 aa, Artificial Sequence
  Peptide Derived from Human Papillomavirus
DLKEKFSA

SEQ ID NO: 36604 - protein, 10 aa, Artificial Sequence
  Peptide Derived from Human Papillomavirus
DLQFVFQLCK

SEQ ID NO: 36605 - protein, 11 aa, Artificial Sequence
  Peptide Derived from Human Papillomavirus
DLYIKGSGTTA

SEQ ID NO: 36606 - protein, 8 aa, Artificial Sequence
  Peptide Derived from Human Papillomavirus
DSLFFFLR

SEQ ID NO: 36607 - protein, 9 aa, Artificial Sequence
  Peptide Derived from Human Papillomavirus
DSLFFFLRR

SEQ ID NO: 36608 - protein, 9 aa, Artificial Sequence
  Peptide Derived from Human Papillomavirus
DSTYKNENF

SEQ ID NO: 36609 - protein, 10 aa, Artificial Sequence
  Peptide Derived from Human Papillomavirus
DSTYKNENFK

SEQ ID NO: 36610 - protein, 8 aa, Artificial Sequence
  Peptide Derived from Human Papillomavirus
DTETGNKY

SEQ ID NO: 36611 - protein, 9 aa, Artificial Sequence
  Peptide Derived from Human Papillomavirus
DTGFGCMDF

SEQ ID NO: 36612 - protein, 10 aa, Artificial Sequence
  Peptide Derived from Human Papillomavirus
DTGFGCMDFK

SEQ ID NO: 36613 - protein, 8 aa, Artificial Sequence
  Peptide Derived from Human Papillomavirus
DTQRLVWA

SEQ ID NO: 36614 - protein, 11 aa, Artificial Sequence
  Peptide Derived from Human Papillomavirus
DTSFYNPDTQR

SEQ ID NO: 36615 - protein, 10 aa, Artificial Sequence
  Peptide Derived from Human Papillomavirus
DTYRFVTSQA

SEQ ID NO: 36616 - protein, 8 aa, Artificial Sequence
  Peptide Derived from Human Papillomavirus
EAVPDDLY

SEQ ID NO: 36617 - protein, 10 aa, Artificial Sequence
  Peptide Derived from Human Papillomavirus
EAVPDDLYIK

SEQ ID NO: 36618 - protein, 8 aa, Artificial Sequence
  Peptide Derived from Human Papillomavirus
ECLSMDYK

SEQ ID NO: 36619 - protein, 10 aa, Artificial Sequence
  Peptide Derived from Human Papillomavirus
EDGDMVDTGF

SEQ ID NO: 36620 - protein, 9 aa, Artificial Sequence
  Peptide Derived from Human Papillomavirus
EDPLGKYTF

SEQ ID NO: 36621 - protein, 9 aa, Artificial Sequence
  Peptide Derived from Human Papillomavirus
ESQLFNKPY

SEQ ID NO: 36622 - protein, 8 aa, Artificial Sequence
  Peptide Derived from Human Papillomavirus
EVDLKEKF

SEQ ID NO: 36623 - protein, 10 aa, Artificial Sequence
  Peptide Derived from Human Papillomavirus
EVDLKEKFSA

SEQ ID NO: 36624 - protein, 8 aa, Artificial Sequence
  Peptide Derived from Human Papillomavirus
EVMTYIHA

SEQ ID NO: 36625 - protein, 9 aa, Artificial Sequence
  Peptide Derived from Human Papillomavirus
FDDTETGNK

SEQ ID NO: 36626 - protein, 10 aa, Artificial Sequence
  Peptide Derived from Human Papillomavirus
FDDTETGNKY

SEQ ID NO: 36627 - protein, 10 aa, Artificial Sequence
  Peptide Derived from Human Papillomavirus
FFFLRREQMF

SEQ ID NO: 36628 - protein, 9 aa, Artificial Sequence
  Peptide Derived from Human Papillomavirus
FFLRREQMF

SEQ ID NO: 36629 - protein, 11 aa, Artificial Sequence
  Peptide Derived from Human Papillomavirus
FFLRREQMFVR

SEQ ID NO: 36630 - protein, 11 aa, Artificial Sequence
  Peptide Derived from Human Papillomavirus
FFNRAGTLGEA

SEQ ID NO: 36631 - protein, 11 aa, Artificial Sequence
  Peptide Derived from Human Papillomavirus
FGCMDFKTLQA

SEQ ID NO: 36632 - protein, 8 aa, Artificial Sequence
  Peptide Derived from Human Papillomavirus
FGFPDTSF

SEQ ID NO: 36633 - protein, 9 aa, Artificial Sequence
  Peptide Derived from Human Papillomavirus
FGFPDTSFY

SEQ ID NO: 36634 - protein, 9 aa, Artificial Sequence
  Peptide Derived from Human Papillomavirus
FGLTPPPSA

SEQ ID NO: 36635 - protein, 8 aa, Artificial Sequence
  Peptide Derived from Human Papillomavirus
FLLQAGLK

SEQ ID NO: 36636 - protein, 9 aa, Artificial Sequence
  Peptide Derived from Human Papillomavirus
FLLQAGLKA

SEQ ID NO: 36637 - protein, 10 aa, Artificial Sequence
  Peptide Derived from Human Papillomavirus
FLLQAGLKAK

SEQ ID NO: 36638 - protein, 8 aa, Artificial Sequence
  Peptide Derived from Human Papillomavirus
FLRREQMF

SEQ ID NO: 36639 - protein, 10 aa, Artificial Sequence
  Peptide Derived from Human Papillomavirus
FLRREQMFVR

SEQ ID NO: 36640 - protein, 11 aa, Artificial Sequence
  Peptide Derived from Human Papillomavirus
FLRREQMFVRH

SEQ ID NO: 36641 - protein, 8 aa, Artificial Sequence
  Peptide Derived from Human Papillomavirus
FSADLDQF

SEQ ID NO: 36642 - protein, 9 aa, Artificial Sequence
  Peptide Derived from Human Papillomavirus
FSIKNPTNA

SEQ ID NO: 36643 - protein, 10 aa, Artificial Sequence
  Peptide Derived from Human Papillomavirus
FSIKNPTNAK

SEQ ID NO: 36644 - protein, 11 aa, Artificial Sequence
  Peptide Derived from Human Papillomavirus
FSIKNPTNAKK

SEQ ID NO: 36645 - protein, 8 aa, Artificial Sequence
  Peptide Derived from Human Papillomavirus
FVRHFFNR

SEQ ID NO: 36646 - protein, 9 aa, Artificial Sequence
  Peptide Derived from Human Papillomavirus
FVRHFFNRA

SEQ ID NO: 36647 - protein, 11 aa, Artificial Sequence
  Peptide Derived from Human Papillomavirus
FVTSQAITCQK

SEQ ID NO: 36648 - protein, 9 aa, Artificial Sequence
  Peptide Derived from Human Papillomavirus
FVTVVDTTR

SEQ ID NO: 36649 - protein, 9 aa, Artificial Sequence
  Peptide Derived from Human Papillomavirus
GCKPPTGEH

SEQ ID NO: 36650 - protein, 10 aa, Artificial Sequence
  Peptide Derived from Human Papillomavirus
GCMDFKTLQA

SEQ ID NO: 36651 - protein, 8 aa, Artificial Sequence
  Peptide Derived from Human Papillomavirus
GDMVDTGF

SEQ ID NO: 36652 - protein, 9 aa, Artificial Sequence
  Peptide Derived from Human Papillomavirus
GDSLFFFLR

SEQ ID NO: 36653 - protein, 10 aa, Artificial Sequence
  Peptide Derived from Human Papillomavirus
GDSLFFFLRR

SEQ ID NO: 36654 - protein, 8 aa, Artificial Sequence
  Peptide Derived from Human Papillomavirus
GFGCMDFK

SEQ ID NO: 36655 - protein, 8 aa, Artificial Sequence
  Peptide Derived from Human Papillomavirus
GFPDTSFY

SEQ ID NO: 36656 - protein, 9 aa, Artificial Sequence
  Peptide Derived from Human Papillomavirus
GICWGNQVF

SEQ ID NO: 36657 - protein, 10 aa, Artificial Sequence
  Peptide Derived from Human Papillomavirus
GISGHPLLNK

SEQ ID NO: 36658 - protein, 11 aa, Artificial Sequence
  Peptide Derived from Human Papillomavirus
GISGHPLLNKF

SEQ ID NO: 36659 - protein, 9 aa, Artificial Sequence
  Peptide Derived from Human Papillomavirus
GLKAKPKLK

SEQ ID NO: 36660 - protein, 10 aa, Artificial Sequence
  Peptide Derived from Human Papillomavirus
GLKAKPKLKR

SEQ ID NO: 36661 - protein, 11 aa, Artificial Sequence
  Peptide Derived from Human Papillomavirus
GLKAKPKLKRA

SEQ ID NO: 36662 - protein, 8 aa, Artificial Sequence
  Peptide Derived from Human Papillomavirus
GLQYRVFR

SEQ ID NO: 36663 - protein, 10 aa, Artificial Sequence
  Peptide Derived from Human Papillomavirus
GLQYRVFRVR

SEQ ID NO: 36664 - protein, 8 aa, Artificial Sequence
  Peptide Derived from Human Papillomavirus
GLTPPPSA

SEQ ID NO: 36665 - protein, 11 aa, Artificial Sequence
  Peptide Derived from Human Papillomavirus
GSMVTSESQLF

SEQ ID NO: 36666 - protein, 10 aa, Artificial Sequence
  Peptide Derived from Human Papillomavirus
GSSRLLAVGH

SEQ ID NO: 36667 - protein, 9 aa, Artificial Sequence
  Peptide Derived from Human Papillomavirus
GSTCKYPDY

SEQ ID NO: 36668 - protein, 11 aa, Artificial Sequence
  Peptide Derived from Human Papillomavirus
GSTCKYPDYLK

SEQ ID NO: 36669 - protein, 10 aa, Artificial Sequence
  Peptide Derived from Human Papillomavirus
GTTASIQSSA

SEQ ID NO: 36670 - protein, 11 aa, Artificial Sequence
  Peptide Derived from Human Papillomavirus
GTTASIQSSAF

SEQ ID NO: 36671 - protein, 8 aa, Artificial Sequence
  Peptide Derived from Human Papillomavirus
GVACTNAA

SEQ ID NO: 36672 - protein, 10 aa, Artificial Sequence
  Peptide Derived from Human Papillomavirus
GVACTNAAPA

SEQ ID NO: 36673 - protein, 9 aa, Artificial Sequence
  Peptide Derived from Human Papillomavirus
HVEEYDLQF

SEQ ID NO: 36674 - protein, 11 aa, Artificial Sequence
  Peptide Derived from Human Papillomavirus
HVEEYDLQFVF

SEQ ID NO: 36675 - protein, 8 aa, Artificial Sequence
  Peptide Derived from Human Papillomavirus
ICGSTCKY

SEQ ID NO: 36676 - protein, 11 aa, Artificial Sequence
  Peptide Derived from Human Papillomavirus
ICGSTCKYPDY

SEQ ID NO: 36677 - protein, 8 aa, Artificial Sequence
  Peptide Derived from Human Papillomavirus
ICWGNQVF

SEQ ID NO: 36678 - protein, 9 aa, Artificial Sequence
  Peptide Derived from Human Papillomavirus
IDICGSTCK

SEQ ID NO: 36679 - protein, 10 aa, Artificial Sequence
  Peptide Derived from Human Papillomavirus
IDICGSTCKY

SEQ ID NO: 36680 - protein, 9 aa, Artificial Sequence
  Peptide Derived from Human Papillomavirus
ISGHPLLNK

SEQ ID NO: 36681 - protein, 10 aa, Artificial Sequence
  Peptide Derived from Human Papillomavirus
ISGHPLLNKF

SEQ ID NO: 36682 - protein, 10 aa, Artificial Sequence
  Peptide Derived from Human Papillomavirus
ITCQKTVPPK

SEQ ID NO: 36683 - protein, 8 aa, Artificial Sequence
  Peptide Derived from Human Papillomavirus
KAKPKLKR

SEQ ID NO: 36684 - protein, 9 aa, Artificial Sequence
  Peptide Derived from Human Papillomavirus
KAKPKLKRA

SEQ ID NO: 36685 - protein, 10 aa, Artificial Sequence
  Peptide Derived from Human Papillomavirus
KAKPKLKRAA

SEQ ID NO: 36686 - protein, 10 aa, Artificial Sequence
  Peptide Derived from Human Papillomavirus
KFDDTETGNK

SEQ ID NO: 36687 - protein, 11 aa, Artificial Sequence
  Peptide Derived from Human Papillomavirus
KFDDTETGNKY

SEQ ID NO: 36688 - protein, 9 aa, Artificial Sequence
  Peptide Derived from Human Papillomavirus
KFGFPDTSF

SEQ ID NO: 36689 - protein, 10 aa, Artificial Sequence
  Peptide Derived from Human Papillomavirus
KFGFPDTSFY

SEQ ID NO: 36690 - protein, 9 aa, Artificial Sequence
  Peptide Derived from Human Papillomavirus
KFLLQAGLK

SEQ ID NO: 36691 - protein, 10 aa, Artificial Sequence
  Peptide Derived from Human Papillomavirus
KFLLQAGLKA

SEQ ID NO: 36692 - protein, 11 aa, Artificial Sequence
  Peptide Derived from Human Papillomavirus
KFLLQAGLKAK

SEQ ID NO: 36693 - protein, 9 aa, Artificial Sequence
  Peptide Derived from Human Papillomavirus
KFSADLDQF

SEQ ID NO: 36694 - protein, 8 aa, Artificial Sequence
  Peptide Derived from Human Papillomavirus
KGVACTNA

SEQ ID NO: 36695 - protein, 9 aa, Artificial Sequence
  Peptide Derived from Human Papillomavirus
KGVACTNAA

SEQ ID NO: 36696 - protein, 11 aa, Artificial Sequence
  Peptide Derived from Human Papillomavirus
KGVACTNAAPA

SEQ ID NO: 36697 - protein, 11 aa, Artificial Sequence
  Peptide Derived from Human Papillomavirus
KLKRAAPTSTR

SEQ ID NO: 36698 - protein, 8 aa, Artificial Sequence
  Peptide Derived from Human Papillomavirus
KTVPPKEK

SEQ ID NO: 36699 - protein, 8 aa, Artificial Sequence
  Peptide Derived from Human Papillomavirus
KVSGLQYR

SEQ ID NO: 36700 - protein, 10 aa, Artificial Sequence
  Peptide Derived from Human Papillomavirus
KVSGLQYRVF

SEQ ID NO: 36701 - protein, 11 aa, Artificial Sequence
  Peptide Derived from Human Papillomavirus
KVSGLQYRVFR

SEQ ID NO: 36702 - protein, 11 aa, Artificial Sequence
  Peptide Derived from Human Papillomavirus
KVTLTAEVMTY

SEQ ID NO: 36703 - protein, 8 aa, Artificial Sequence
  Peptide Derived from Human Papillomavirus
KVVSTDEY

SEQ ID NO: 36704 - protein, 11 aa, Artificial Sequence
  Peptide Derived from Human Papillomavirus
KVVSTDEYVSR

SEQ ID NO: 36705 - protein, 8 aa, Artificial Sequence
  Peptide Derived from Human Papillomavirus
LAVGHPYF

SEQ ID NO: 36706 - protein, 11 aa, Artificial Sequence
  Peptide Derived from Human Papillomavirus
LAVGHPYFSIK

SEQ ID NO: 36707 - protein, 8 aa, Artificial Sequence
  Peptide Derived from Human Papillomavirus
LCKVTLTA

SEQ ID NO: 36708 - protein, 11 aa, Artificial Sequence
  Peptide Derived from Human Papillomavirus
LCTQVTSDSTY

SEQ ID NO: 36709 - protein, 8 aa, Artificial Sequence
  Peptide Derived from Human Papillomavirus
LDQFPLGR

SEQ ID NO: 36710 - protein, 9 aa, Artificial Sequence
  Peptide Derived from Human Papillomavirus
LDQFPLGRK

SEQ ID NO: 36711 - protein, 10 aa, Artificial Sequence
  Peptide Derived from Human Papillomavirus
LDQFPLGRKF

SEQ ID NO: 36712 - protein, 11 aa, Artificial Sequence
  Peptide Derived from Human Papillomavirus
LFFFLRREQMF

SEQ ID NO: 36713 - protein, 10 aa, Artificial Sequence
  Peptide Derived from Human Papillomavirus
LFNKPYWLQR

SEQ ID NO: 36714 - protein, 11 aa, Artificial Sequence
  Peptide Derived from Human Papillomavirus
LFNKPYWLQRA

SEQ ID NO: 36715 - protein, 10 aa, Artificial Sequence
  Peptide Derived from Human Papillomavirus
LGCKPPTGEH

SEQ ID NO: 36716 - protein, 10 aa, Artificial Sequence
  Peptide Derived from Human Papillomavirus
LGEAVPDDLY

SEQ ID NO: 36717 - protein, 9 aa, Artificial Sequence
  Peptide Derived from Human Papillomavirus
LGRKFLLQA

SEQ ID NO: 36718 - protein, 8 aa, Artificial Sequence
  Peptide Derived from Human Papillomavirus
LGVGISGH

SEQ ID NO: 36719 - protein, 8 aa, Artificial Sequence
  Peptide Derived from Human Papillomavirus
LLAVGHPY

SEQ ID NO: 36720 - protein, 9 aa, Artificial Sequence
  Peptide Derived from Human Papillomavirus
LLAVGHPYF

SEQ ID NO: 36721 - protein, 11 aa, Artificial Sequence
  Peptide Derived from Human Papillomavirus
LLGCKPPTGEH

SEQ ID NO: 36722 - protein, 8 aa, Artificial Sequence
  Peptide Derived from Human Papillomavirus
LLQAGLKA

SEQ ID NO: 36723 - protein, 9 aa, Artificial Sequence
  Peptide Derived from Human Papillomavirus
LLQAGLKAK

SEQ ID NO: 36724 - protein, 11 aa, Artificial Sequence
  Peptide Derived from Human Papillomavirus
LLQAGLKAKPK

SEQ ID NO: 36725 - protein, 11 aa, Artificial Sequence
  Peptide Derived from Human Papillomavirus
LLVPKVSGLQY

SEQ ID NO: 36726 - protein, 8 aa, Artificial Sequence
  Peptide Derived from Human Papillomavirus
LTAEVMTY

SEQ ID NO: 36727 - protein, 10 aa, Artificial Sequence
  Peptide Derived from Human Papillomavirus
LTAEVMTYIH

SEQ ID NO: 36728 - protein, 11 aa, Artificial Sequence
  Peptide Derived from Human Papillomavirus
LTAEVMTYIHA

SEQ ID NO: 36729 - protein, 10 aa, Artificial Sequence
  Peptide Derived from Human Papillomavirus
LVPKVSGLQY

SEQ ID NO: 36730 - protein, 11 aa, Artificial Sequence
  Peptide Derived from Human Papillomavirus
LVPKVSGLQYR

SEQ ID NO: 36731 - protein, 8 aa, Artificial Sequence
  Peptide Derived from Human Papillomavirus
MDFKTLQA

SEQ ID NO: 36732 - protein, 10 aa, Artificial Sequence
  Peptide Derived from Human Papillomavirus
MDFKTLQANK

SEQ ID NO: 36733 - protein, 9 aa, Artificial Sequence
  Peptide Derived from Human Papillomavirus
MFVRHFFNR

SEQ ID NO: 36734 - protein, 10 aa, Artificial Sequence
  Peptide Derived from Human Papillomavirus
MFVRHFFNRA

SEQ ID NO: 36735 - protein, 9 aa, Artificial Sequence
  Peptide Derived from Human Papillomavirus
MSVWRPSEA

SEQ ID NO: 36736 - protein, 11 aa, Artificial Sequence
  Peptide Derived from Human Papillomavirus
MTSEPYGDSLF

SEQ ID NO: 36737 - protein, 11 aa, Artificial Sequence
  Peptide Derived from Human Papillomavirus
MVDTGFGCMDF

SEQ ID NO: 36738 - protein, 9 aa, Artificial Sequence
  Peptide Derived from Human Papillomavirus
MVTSESQLF

SEQ ID NO: 36739 - protein, 11 aa, Artificial Sequence
  Peptide Derived from Human Papillomavirus
MVTSESQLFNK

SEQ ID NO: 36740 - protein, 9 aa, Artificial Sequence
  Peptide Derived from Human Papillomavirus
NAKKLLVPK

SEQ ID NO: 36741 - protein, 8 aa, Artificial Sequence
  Peptide Derived from Human Papillomavirus
NFKEYIRH

SEQ ID NO: 36742 - protein, 10 aa, Artificial Sequence
  Peptide Derived from Human Papillomavirus
NGICWGNQVF

SEQ ID NO: 36743 - protein, 9 aa, Artificial Sequence
  Peptide Derived from Human Papillomavirus
PDILEDWQF

SEQ ID NO: 36744 - protein, 8 aa, Artificial Sequence
  Peptide Derived from Human Papillomavirus
PDPNKFGF

SEQ ID NO: 36745 - protein, 9 aa, Artificial Sequence
  Peptide Derived from Human Papillomavirus
PDTQRLVWA

SEQ ID NO: 36746 - protein, 11 aa, Artificial Sequence
  Peptide Derived from Human Papillomavirus
PDYLKMTSEPY

SEQ ID NO: 36747 - protein, 9 aa, Artificial Sequence
  Peptide Derived from Human Papillomavirus
PGQPGADNR

SEQ ID NO: 36748 - protein, 10 aa, Artificial Sequence
  Peptide Derived from Human Papillomavirus
PIDICGSTCK

SEQ ID NO: 36749 - protein, 11 aa, Artificial Sequence
  Peptide Derived from Human Papillomavirus
PIDICGSTCKY

SEQ ID NO: 36750 - protein, 10 aa, Artificial Sequence
  Peptide Derived from Human Papillomavirus
PLGRKFLLQA

SEQ ID NO: 36751 - protein, 9 aa, Artificial Sequence
  Peptide Derived from Human Papillomavirus
PLGVGISGH

SEQ ID NO: 36752 - protein, 9 aa, Artificial Sequence
  Peptide Derived from Human Papillomavirus
PSASLQDTY

SEQ ID NO: 36753 - protein, 10 aa, Artificial Sequence
  Peptide Derived from Human Papillomavirus
PSASLQDTYR

SEQ ID NO: 36754 - protein, 11 aa, Artificial Sequence
  Peptide Derived from Human Papillomavirus
PSASLQDTYRF

SEQ ID NO: 36755 - protein, 8 aa, Artificial Sequence
  Peptide Derived from Human Papillomavirus
PTGEHWGK

SEQ ID NO: 36756 - protein, 11 aa, Artificial Sequence
  Peptide Derived from Human Papillomavirus
PTGEHWGKGVA

SEQ ID NO: 36757 - protein, 11 aa, Artificial Sequence
  Peptide Derived from Human Papillomavirus
PTNAKKLLVPK

SEQ ID NO: 36758 - protein, 9 aa, Artificial Sequence
  Peptide Derived from Human Papillomavirus
PTSTRTSSA

SEQ ID NO: 36759 - protein, 10 aa, Artificial Sequence
  Peptide Derived from Human Papillomavirus
PTSTRTSSAK

SEQ ID NO: 36760 - protein, 11 aa, Artificial Sequence
  Peptide Derived from Human Papillomavirus
PTSTRTSSAKR

SEQ ID NO: 36761 - protein, 11 aa, Artificial Sequence
  Peptide Derived from Human Papillomavirus
PVSKVVSTDEY

SEQ ID NO: 36762 - protein, 9 aa, Artificial Sequence
  Peptide Derived from Human Papillomavirus
QAGLKAKPK

SEQ ID NO: 36763 - protein, 11 aa, Artificial Sequence
  Peptide Derived from Human Papillomavirus
QAGLKAKPKLK

SEQ ID NO: 36764 - protein, 11 aa, Artificial Sequence
  Peptide Derived from Human Papillomavirus
QDTYRFVTSQA

SEQ ID NO: 36765 - protein, 10 aa, Artificial Sequence
  Peptide Derived from Human Papillomavirus
QFGLTPPPSA

SEQ ID NO: 36766 - protein, 8 aa, Artificial Sequence
  Peptide Derived from Human Papillomavirus
QFPLGRKF

SEQ ID NO: 36767 - protein, 8 aa, Artificial Sequence
  Peptide Derived from Human Papillomavirus
QFVFQLCK

SEQ ID NO: 36768 - protein, 9 aa, Artificial Sequence
  Peptide Derived from Human Papillomavirus
QLCKVTLTA

SEQ ID NO: 36769 - protein, 8 aa, Artificial Sequence
  Peptide Derived from Human Papillomavirus
QLCLLGCK

SEQ ID NO: 36770 - protein, 11 aa, Artificial Sequence
  Peptide Derived from Human Papillomavirus
QLFNKPYWLQR

SEQ ID NO: 36771 - protein, 8 aa, Artificial Sequence
  Peptide Derived from Human Papillomavirus
QMFVRHFF

SEQ ID NO: 36772 - protein, 10 aa, Artificial Sequence
  Peptide Derived from Human Papillomavirus
QMFVRHFFNR

SEQ ID NO: 36773 - protein, 11 aa, Artificial Sequence
  Peptide Derived from Human Papillomavirus
QMFVRHFFNRA

SEQ ID NO: 36774 - protein, 10 aa, Artificial Sequence
  Peptide Derived from Human Papillomavirus
QTQLCLLGCK

SEQ ID NO: 36775 - protein, 11 aa, Artificial Sequence
  Peptide Derived from Human Papillomavirus
QVFVTVVDTTR

SEQ ID NO: 36776 - protein, 8 aa, Artificial Sequence
  Peptide Derived from Human Papillomavirus
QVTSDSTY

SEQ ID NO: 36777 - protein, 9 aa, Artificial Sequence
  Peptide Derived from Human Papillomavirus
QVTSDSTYK

SEQ ID NO: 36778 - protein, 8 aa, Artificial Sequence
  Peptide Derived from Human Papillomavirus
RAAPTSTR

SEQ ID NO: 36779 - protein, 8 aa, Artificial Sequence
  Peptide Derived from Human Papillomavirus
RAGTLGEA

SEQ ID NO: 36780 - protein, 9 aa, Artificial Sequence
  Peptide Derived from Human Papillomavirus
RLLAVGHPY

SEQ ID NO: 36781 - protein, 10 aa, Artificial Sequence
  Peptide Derived from Human Papillomavirus
RLLAVGHPYF

SEQ ID NO: 36782 - protein, 8 aa, Artificial Sequence
  Peptide Derived from Human Papillomavirus
RLPDPNKF

SEQ ID NO: 36783 - protein, 10 aa, Artificial Sequence
  Peptide Derived from Human Papillomavirus
RLPDPNKFGF

SEQ ID NO: 36784 - protein, 8 aa, Artificial Sequence
  Peptide Derived from Human Papillomavirus
RTSIYYYA

SEQ ID NO: 36785 - protein, 8 aa, Artificial Sequence
  Peptide Derived from Human Papillomavirus
RTSSAKRK

SEQ ID NO: 36786 - protein, 9 aa, Artificial Sequence
  Peptide Derived from Human Papillomavirus
RTSSAKRKK

SEQ ID NO: 36787 - protein, 11 aa, Artificial Sequence
  Peptide Derived from Human Papillomavirus
RTSSAKRKKVK

SEQ ID NO: 36788 - protein, 9 aa, Artificial Sequence
  Peptide Derived from Human Papillomavirus
RVRLPDPNK

SEQ ID NO: 36789 - protein, 10 aa, Artificial Sequence
  Peptide Derived from Human Papillomavirus
RVRLPDPNKF

SEQ ID NO: 36790 - protein, 11 aa, Artificial Sequence
  Peptide Derived from Human Papillomavirus
SADLDQFPLGR

SEQ ID NO: 36791 - protein, 8 aa, Artificial Sequence
  Peptide Derived from Human Papillomavirus
SAKRKKVK

SEQ ID NO: 36792 - protein, 9 aa, Artificial Sequence
  Peptide Derived from Human Papillomavirus
SAKRKKVKK

SEQ ID NO: 36793 - protein, 8 aa, Artificial Sequence
  Peptide Derived from Human Papillomavirus
SASLQDTY

SEQ ID NO: 36794 - protein, 9 aa, Artificial Sequence
  Peptide Derived from Human Papillomavirus
SASLQDTYR

SEQ ID NO: 36795 - protein, 10 aa, Artificial Sequence
  Peptide Derived from Human Papillomavirus
SASLQDTYRF

SEQ ID NO: 36796 - protein, 10 aa, Artificial Sequence
  Peptide Derived from Human Papillomavirus
SDSTYKNENF

SEQ ID NO: 36797 - protein, 11 aa, Artificial Sequence
  Peptide Derived from Human Papillomavirus
SDSTYKNENFK

SEQ ID NO: 36798 - protein, 9 aa, Artificial Sequence
  Peptide Derived from Human Papillomavirus
SFYNPDTQR

SEQ ID NO: 36799 - protein, 8 aa, Artificial Sequence
  Peptide Derived from Human Papillomavirus
SGHPLLNK

SEQ ID NO: 36800 - protein, 9 aa, Artificial Sequence
  Peptide Derived from Human Papillomavirus
SGHPLLNKF

SEQ ID NO: 36801 - protein, 8 aa, Artificial Sequence
  Peptide Derived from Human Papillomavirus
SGLQYRVF

SEQ ID NO: 36802 - protein, 9 aa, Artificial Sequence
  Peptide Derived from Human Papillomavirus
SGLQYRVFR

SEQ ID NO: 36803 - protein, 11 aa, Artificial Sequence
  Peptide Derived from Human Papillomavirus
SGLQYRVFRVR

SEQ ID NO: 36804 - protein, 11 aa, Artificial Sequence
  Peptide Derived from Human Papillomavirus
SGTTASIQSSA

SEQ ID NO: 36805 - protein, 8 aa, Artificial Sequence
  Peptide Derived from Human Papillomavirus
SIKNPTNA

SEQ ID NO: 36806 - protein, 9 aa, Artificial Sequence
  Peptide Derived from Human Papillomavirus
SIKNPTNAK

SEQ ID NO: 36807 - protein, 10 aa, Artificial Sequence
  Peptide Derived from Human Papillomavirus
SIKNPTNAKK

SEQ ID NO: 36808 - protein, 8 aa, Artificial Sequence
  Peptide Derived from Human Papillomavirus
SIQSSAFF

SEQ ID NO: 36809 - protein, 10 aa, Artificial Sequence
  Peptide Derived from Human Papillomavirus
SIYYYAGSSR

SEQ ID NO: 36810 - protein, 8 aa, Artificial Sequence
  Peptide Derived from Human Papillomavirus
SLFFFLRR

SEQ ID NO: 36811 - protein, 8 aa, Artificial Sequence
  Peptide Derived from Human Papillomavirus
SLQDTYRF

SEQ ID NO: 36812 - protein, 10 aa, Artificial Sequence
  Peptide Derived from Human Papillomavirus
SMVTSESQLF

SEQ ID NO: 36813 - protein, 9 aa, Artificial Sequence
  Peptide Derived from Human Papillomavirus
SSAKRKKVK

SEQ ID NO: 36814 - protein, 10 aa, Artificial Sequence
  Peptide Derived from Human Papillomavirus
SSAKRKKVKK

SEQ ID NO: 36815 - protein, 9 aa, Artificial Sequence
  Peptide Derived from Human Papillomavirus
SSRLLAVGH

SEQ ID NO: 36816 - protein, 11 aa, Artificial Sequence
  Peptide Derived from Human Papillomavirus
SSRLLAVGHPY

SEQ ID NO: 36817 - protein, 8 aa, Artificial Sequence
  Peptide Derived from Human Papillomavirus
STCKYPDY

SEQ ID NO: 36818 - protein, 10 aa, Artificial Sequence
  Peptide Derived from Human Papillomavirus
STCKYPDYLK

SEQ ID NO: 36819 - protein, 8 aa, Artificial Sequence
  Peptide Derived from Human Papillomavirus
STDEYVSR

SEQ ID NO: 36820 - protein, 8 aa, Artificial Sequence
  Peptide Derived from Human Papillomavirus
STRTSSAK

SEQ ID NO: 36821 - protein, 9 aa, Artificial Sequence
  Peptide Derived from Human Papillomavirus
STRTSSAKR

SEQ ID NO: 36822 - protein, 10 aa, Artificial Sequence
  Peptide Derived from Human Papillomavirus
STRTSSAKRK

SEQ ID NO: 36823 - protein, 11 aa, Artificial Sequence
  Peptide Derived from Human Papillomavirus
STRTSSAKRKK

SEQ ID NO: 36824 - protein, 8 aa, Artificial Sequence
  Peptide Derived from Human Papillomavirus
STYKNENF

SEQ ID NO: 36825 - protein, 9 aa, Artificial Sequence
  Peptide Derived from Human Papillomavirus
STYKNENFK

SEQ ID NO: 36826 - protein, 11 aa, Artificial Sequence
  Peptide Derived from Human Papillomavirus
STYKNENFKEY

SEQ ID NO: 36827 - protein, 8 aa, Artificial Sequence
  Peptide Derived from Human Papillomavirus
SVWRPSEA

SEQ ID NO: 36828 - protein, 11 aa, Artificial Sequence
  Peptide Derived from Human Papillomavirus
SVWRPSEATVY

SEQ ID NO: 36829 - protein, 9 aa, Artificial Sequence
  Peptide Derived from Human Papillomavirus
TAEVMTYIH

SEQ ID NO: 36830 - protein, 10 aa, Artificial Sequence
  Peptide Derived from Human Papillomavirus
TAEVMTYIHA

SEQ ID NO: 36831 - protein, 8 aa, Artificial Sequence
  Peptide Derived from Human Papillomavirus
TASIQSSA

SEQ ID NO: 36832 - protein, 9 aa, Artificial Sequence
  Peptide Derived from Human Papillomavirus
TASIQSSAF

SEQ ID NO: 36833 - protein, 10 aa, Artificial Sequence
  Peptide Derived from Human Papillomavirus
TASIQSSAFF

SEQ ID NO: 36834 - protein, 9 aa, Artificial Sequence
  Peptide Derived from Human Papillomavirus
TCKYPDYLK

SEQ ID NO: 36835 - protein, 9 aa, Artificial Sequence
  Peptide Derived from Human Papillomavirus
TCQKTVPPK

SEQ ID NO: 36836 - protein, 11 aa, Artificial Sequence
  Peptide Derived from Human Papillomavirus
TCQKTVPPKEK

SEQ ID NO: 36837 - protein, 11 aa, Artificial Sequence
  Peptide Derived from Human Papillomavirus
TDEYVSRTSIY

SEQ ID NO: 36838 - protein, 8 aa, Artificial Sequence
  Peptide Derived from Human Papillomavirus
TFWEVDLK

SEQ ID NO: 36839 - protein, 10 aa, Artificial Sequence
  Peptide Derived from Human Papillomavirus
TFWEVDLKEK

SEQ ID NO: 36840 - protein, 11 aa, Artificial Sequence
  Peptide Derived from Human Papillomavirus
TFWEVDLKEKF

SEQ ID NO: 36841 - protein, 10 aa, Artificial Sequence
  Peptide Derived from Human Papillomavirus
TGEHWGKGVA

SEQ ID NO: 36842 - protein, 8 aa, Artificial Sequence
  Peptide Derived from Human Papillomavirus
TGFGCMDF

SEQ ID NO: 36843 - protein, 9 aa, Artificial Sequence
  Peptide Derived from Human Papillomavirus
TGFGCMDFK

SEQ ID NO: 36844 - protein, 11 aa, Artificial Sequence
  Peptide Derived from Human Papillomavirus
TGNKYPGQPGA

SEQ ID NO: 36845 - protein, 11 aa, Artificial Sequence
  Peptide Derived from Human Papillomavirus
TLGEAVPDDLY

SEQ ID NO: 36846 - protein, 9 aa, Artificial Sequence
  Peptide Derived from Human Papillomavirus
TLTAEVMTY

SEQ ID NO: 36847 - protein, 11 aa, Artificial Sequence
  Peptide Derived from Human Papillomavirus
TLTAEVMTYIH

SEQ ID NO: 36848 - protein, 11 aa, Artificial Sequence
  Peptide Derived from Human Papillomavirus
TSDSTYKNENF

SEQ ID NO: 36849 - protein, 10 aa, Artificial Sequence
  Peptide Derived from Human Papillomavirus
TSEPYGDSLF

SEQ ID NO: 36850 - protein, 11 aa, Artificial Sequence
  Peptide Derived from Human Papillomavirus
TSEPYGDSLFF

SEQ ID NO: 36851 - protein, 9 aa, Artificial Sequence
  Peptide Derived from Human Papillomavirus
TSESQLFNK

SEQ ID NO: 36852 - protein, 11 aa, Artificial Sequence
  Peptide Derived from Human Papillomavirus
TSESQLFNKPY

SEQ ID NO: 36853 - protein, 10 aa, Artificial Sequence
  Peptide Derived from Human Papillomavirus
TSFYNPDTQR

SEQ ID NO: 36854 - protein, 11 aa, Artificial Sequence
  Peptide Derived from Human Papillomavirus
TSIYYYAGSSR

SEQ ID NO: 36855 - protein, 9 aa, Artificial Sequence
  Peptide Derived from Human Papillomavirus
TSQAITCQK

SEQ ID NO: 36856 - protein, 8 aa, Artificial Sequence
  Peptide Derived from Human Papillomavirus
TSSAKRKK

SEQ ID NO: 36857 - protein, 10 aa, Artificial Sequence
  Peptide Derived from Human Papillomavirus
TSSAKRKKVK

SEQ ID NO: 36858 - protein, 11 aa, Artificial Sequence
  Peptide Derived from Human Papillomavirus
TSSAKRKKVKK

SEQ ID NO: 36859 - protein, 8 aa, Artificial Sequence
  Peptide Derived from Human Papillomavirus
TSTRTSSA

SEQ ID NO: 36860 - protein, 9 aa, Artificial Sequence
  Peptide Derived from Human Papillomavirus
TSTRTSSAK

SEQ ID NO: 36861 - protein, 10 aa, Artificial Sequence
  Peptide Derived from Human Papillomavirus
TSTRTSSAKR

SEQ ID NO: 36862 - protein, 11 aa, Artificial Sequence
  Peptide Derived from Human Papillomavirus
TSTRTSSAKRK

SEQ ID NO: 36863 - protein, 9 aa, Artificial Sequence
  Peptide Derived from Human Papillomavirus
TTASIQSSA

SEQ ID NO: 36864 - protein, 10 aa, Artificial Sequence
  Peptide Derived from Human Papillomavirus
TTASIQSSAF

SEQ ID NO: 36865 - protein, 11 aa, Artificial Sequence
  Peptide Derived from Human Papillomavirus
TTASIQSSAFF

SEQ ID NO: 36866 - protein, 11 aa, Artificial Sequence
  Peptide Derived from Human Papillomavirus
TVYLPPVPVSK

SEQ ID NO: 36867 - protein, 9 aa, Artificial Sequence
  Peptide Derived from Human Papillomavirus
VACTNAAPA

SEQ ID NO: 36868 - protein, 9 aa, Artificial Sequence
  Peptide Derived from Human Papillomavirus
VDLKEKFSA

SEQ ID NO: 36869 - protein, 10 aa, Artificial Sequence
  Peptide Derived from Human Papillomavirus
VDTGFGCMDF

SEQ ID NO: 36870 - protein, 11 aa, Artificial Sequence
  Peptide Derived from Human Papillomavirus
VDTGFGCMDFK

SEQ ID NO: 36871 - protein, 11 aa, Artificial Sequence
  Peptide Derived from Human Papillomavirus
VFQLCKVTLTA

SEQ ID NO: 36872 - protein, 11 aa, Artificial Sequence
  Peptide Derived from Human Papillomavirus
VFRVRLPDPNK

SEQ ID NO: 36873 - protein, 10 aa, Artificial Sequence
  Peptide Derived from Human Papillomavirus
VFVTVVDTTR

SEQ ID NO: 36874 - protein, 9 aa, Artificial Sequence
  Peptide Derived from Human Papillomavirus
VGHPYFSIK

SEQ ID NO: 36875 - protein, 11 aa, Artificial Sequence
  Peptide Derived from Human Papillomavirus
VGISGHPLLNK

SEQ ID NO: 36876 - protein, 9 aa, Artificial Sequence
  Peptide Derived from Human Papillomavirus
VSGLQYRVF

SEQ ID NO: 36877 - protein, 10 aa, Artificial Sequence
  Peptide Derived from Human Papillomavirus
VSGLQYRVFR

SEQ ID NO: 36878 - protein, 10 aa, Artificial Sequence
  Peptide Derived from Human Papillomavirus
VSKVVSTDEY

SEQ ID NO: 36879 - protein, 8 aa, Artificial Sequence
  Peptide Derived from Human Papillomavirus
VSRTSIYY

SEQ ID NO: 36880 - protein, 9 aa, Artificial Sequence
  Peptide Derived from Human Papillomavirus
VSRTSIYYY

SEQ ID NO: 36881 - protein, 10 aa, Artificial Sequence
  Peptide Derived from Human Papillomavirus
VSRTSIYYYA

SEQ ID NO: 36882 - protein, 9 aa, Artificial Sequence
  Peptide Derived from Human Papillomavirus
VSTDEYVSR

SEQ ID NO: 36883 - protein, 10 aa, Artificial Sequence
  Peptide Derived from Human Papillomavirus
VTLTAEVMTY

SEQ ID NO: 36884 - protein, 8 aa, Artificial Sequence
  Peptide Derived from Human Papillomavirus
VTSDSTYK

SEQ ID NO: 36885 - protein, 8 aa, Artificial Sequence
  Peptide Derived from Human Papillomavirus
VTSESQLF

SEQ ID NO: 36886 - protein, 10 aa, Artificial Sequence
  Peptide Derived from Human Papillomavirus
VTSESQLFNK

SEQ ID NO: 36887 - protein, 10 aa, Artificial Sequence
  Peptide Derived from Human Papillomavirus
VTSQAITCQK

SEQ ID NO: 36888 - protein, 8 aa, Artificial Sequence
  Peptide Derived from Human Papillomavirus
VTVVDTTR

SEQ ID NO: 36889 - protein, 10 aa, Artificial Sequence
  Peptide Derived from Human Papillomavirus
VVSTDEYVSR

SEQ ID NO: 36890 - protein, 10 aa, Artificial Sequence
  Peptide Derived from Human Papillomavirus
WACVGLEIGR

SEQ ID NO: 36891 - protein, 10 aa, Artificial Sequence
  Peptide Derived from Human Papillomavirus
WGKGVACTNA

SEQ ID NO: 36892 - protein, 11 aa, Artificial Sequence
  Peptide Derived from Human Papillomavirus
WGKGVACTNAA

SEQ ID NO: 36893 - protein, 8 aa, Artificial Sequence
  Peptide Derived from Human Papillomavirus
WLQRAQGH

SEQ ID NO: 36894 - protein, 9 aa, Artificial Sequence
  Peptide Derived from Human Papillomavirus
YAGSSRLLA

SEQ ID NO: 36895 - protein, 11 aa, Artificial Sequence
  Peptide Derived from Human Papillomavirus
YDLQFVFQLCK

SEQ ID NO: 36896 - protein, 10 aa, Artificial Sequence
  Peptide Derived from Human Papillomavirus
YFSIKNPTNA

SEQ ID NO: 36897 - protein, 11 aa, Artificial Sequence
  Peptide Derived from Human Papillomavirus
YFSIKNPTNAK

SEQ ID NO: 36898 - protein, 8 aa, Artificial Sequence
  Peptide Derived from Human Papillomavirus
YGDSLFFF

SEQ ID NO: 36899 - protein, 10 aa, Artificial Sequence
  Peptide Derived from Human Papillomavirus
YGDSLFFFLR

SEQ ID NO: 36900 - protein, 11 aa, Artificial Sequence
  Peptide Derived from Human Papillomavirus
YGDSLFFFLRR

SEQ ID NO: 36901 - protein, 9 aa, Artificial Sequence
  Peptide Derived from Human Papillomavirus
YIKGSGTTA

SEQ ID NO: 36902 - protein, 8 aa, Artificial Sequence
  Peptide Derived from Human Papillomavirus
YIRHVEEY

SEQ ID NO: 36903 - protein, 9 aa, Artificial Sequence
  Peptide Derived from Human Papillomavirus
YLKMTSEPY

SEQ ID NO: 36904 - protein, 9 aa, Artificial Sequence
  Peptide Derived from Human Papillomavirus
YLPPVPVSK

SEQ ID NO: 36905 - protein, 9 aa, Artificial Sequence
  Peptide Derived from Human Papillomavirus
YTFWEVDLK

SEQ ID NO: 36906 - protein, 11 aa, Artificial Sequence
  Peptide Derived from Human Papillomavirus
YTFWEVDLKEK

SEQ ID NO: 36907 - protein, 8 aa, Artificial Sequence
  Peptide Derived from Human Papillomavirus
YVSRTSIY

SEQ ID NO: 36908 - protein, 9 aa, Artificial Sequence
  Peptide Derived from Human Papillomavirus
YVSRTSIYY

SEQ ID NO: 36909 - protein, 10 aa, Artificial Sequence
  Peptide Derived from Human Papillomavirus
YVSRTSIYYY

SEQ ID NO: 36910 - protein, 11 aa, Artificial Sequence
  Peptide Derived from Human Papillomavirus
YVSRTSIYYYA

SEQ ID NO: 36911 - protein, 9 aa, Artificial Sequence
  Peptide Derived from Human Papillomavirus
AAIPLQPIR

SEQ ID NO: 36912 - protein, 8 aa, Artificial Sequence
  Peptide Derived from Human Papillomavirus
ADDVDNVH

SEQ ID NO: 36913 - protein, 9 aa, Artificial Sequence
  Peptide Derived from Human Papillomavirus
ADFVLHPSY

SEQ ID NO: 36914 - protein, 10 aa, Artificial Sequence
  Peptide Derived from Human Papillomavirus
ADFVLHPSYF

SEQ ID NO: 36915 - protein, 8 aa, Artificial Sequence
  Peptide Derived from Human Papillomavirus
AFLTSPHK

SEQ ID NO: 36916 - protein, 8 aa, Artificial Sequence
  Peptide Derived from Human Papillomavirus
AIPLQPIR

SEQ ID NO: 36917 - protein, 10 aa, Artificial Sequence
  Peptide Derived from Human Papillomavirus
AITSRRHTVR

SEQ ID NO: 36918 - protein, 11 aa, Artificial Sequence
  Peptide Derived from Human Papillomavirus
AITSRRHTVRF

SEQ ID NO: 36919 - protein, 10 aa, Artificial Sequence
  Peptide Derived from Human Papillomavirus
ALHRPAITSR

SEQ ID NO: 36920 - protein, 11 aa, Artificial Sequence
  Peptide Derived from Human Papillomavirus
ALHRPAITSRR

SEQ ID NO: 36921 - protein, 11 aa, Artificial Sequence
  Peptide Derived from Human Papillomavirus
ASATQLYQTCK

SEQ ID NO: 36922 - protein, 9 aa, Artificial Sequence
  Peptide Derived from Human Papillomavirus
ATLKTRSGK

SEQ ID NO: 36923 - protein, 9 aa, Artificial Sequence
  Peptide Derived from Human Papillomavirus
ATQLYQTCK

SEQ ID NO: 36924 - protein, 10 aa, Artificial Sequence
  Peptide Derived from Human Papillomavirus
ATQLYQTCKA

SEQ ID NO: 36925 - protein, 9 aa, Artificial Sequence
  Peptide Derived from Human Papillomavirus
DFLDIIALH

SEQ ID NO: 36926 - protein, 10 aa, Artificial Sequence
  Peptide Derived from Human Papillomavirus
DFLDIIALHR

SEQ ID NO: 36927 - protein, 8 aa, Artificial Sequence
  Peptide Derived from Human Papillomavirus
DFVLHPSY

SEQ ID NO: 36928 - protein, 9 aa, Artificial Sequence
  Peptide Derived from Human Papillomavirus
DFVLHPSYF

SEQ ID NO: 36929 - protein, 8 aa, Artificial Sequence
  Peptide Derived from Human Papillomavirus
DGADFVLH

SEQ ID NO: 36930 - protein, 11 aa, Artificial Sequence
  Peptide Derived from Human Papillomavirus
DGADFVLHPSY

SEQ ID NO: 36931 - protein, 8 aa, Artificial Sequence
  Peptide Derived from Human Papillomavirus
DGLYDVYA

SEQ ID NO: 36932 - protein, 9 aa, Artificial Sequence
  Peptide Derived from Human Papillomavirus
DIIALHRPA

SEQ ID NO: 36933 - protein, 10 aa, Artificial Sequence
  Peptide Derived from Human Papillomavirus
DISPAPDPDF

SEQ ID NO: 36934 - protein, 10 aa, Artificial Sequence
  Peptide Derived from Human Papillomavirus
DLSPIVPLDH

SEQ ID NO: 36935 - protein, 8 aa, Artificial Sequence
  Peptide Derived from Human Papillomavirus
DTIVVDGA

SEQ ID NO: 36936 - protein, 10 aa, Artificial Sequence
  Peptide Derived from Human Papillomavirus
DTIVVDGADF

SEQ ID NO: 36937 - protein, 11 aa, Artificial Sequence
  Peptide Derived from Human Papillomavirus
DVDNVHTPMQH

SEQ ID NO: 36938 - protein, 11 aa, Artificial Sequence
  Peptide Derived from Human Papillomavirus
DVTTSADTTPA

SEQ ID NO: 36939 - protein, 11 aa, Artificial Sequence
  Peptide Derived from Human Papillomavirus
DVYADDVDNVH

SEQ ID NO: 36940 - protein, 8 aa, Artificial Sequence
  Peptide Derived from Human Papillomavirus
EASGHFIF

SEQ ID NO: 36941 - protein, 8 aa, Artificial Sequence
  Peptide Derived from Human Papillomavirus
EDTLQFQH

SEQ ID NO: 36942 - protein, 11 aa, Artificial Sequence
  Peptide Derived from Human Papillomavirus
EGSTIADQILK

SEQ ID NO: 36943 - protein, 11 aa, Artificial Sequence
  Peptide Derived from Human Papillomavirus
ESFDPEDTLQF

SEQ ID NO: 36944 - protein, 10 aa, Artificial Sequence
  Peptide Derived from Human Papillomavirus
ESSIQTISTH

SEQ ID NO: 36945 - protein, 9 aa, Artificial Sequence
  Peptide Derived from Human Papillomavirus
ETSFIEAGA

SEQ ID NO: 36946 - protein, 11 aa, Artificial Sequence
  Peptide Derived from Human Papillomavirus
ETSFIEAGAPA

SEQ ID NO: 36947 - protein, 9 aa, Artificial Sequence
  Peptide Derived from Human Papillomavirus
FDPEDTLQF

SEQ ID NO: 36948 - protein, 11 aa, Artificial Sequence
  Peptide Derived from Human Papillomavirus
FDPEDTLQFQH

SEQ ID NO: 36949 - protein, 9 aa, Artificial Sequence
  Peptide Derived from Human Papillomavirus
FDTIVVDGA

SEQ ID NO: 36950 - protein, 11 aa, Artificial Sequence
  Peptide Derived from Human Papillomavirus
FDTIVVDGADF

SEQ ID NO: 36951 - protein, 8 aa, Artificial Sequence
  Peptide Derived from Human Papillomavirus
FFTDVRVA

SEQ ID NO: 36952 - protein, 9 aa, Artificial Sequence
  Peptide Derived from Human Papillomavirus
FFTDVRVAA

SEQ ID NO: 36953 - protein, 8 aa, Artificial Sequence
  Peptide Derived from Human Papillomavirus
FIEAGAPA

SEQ ID NO: 36954 - protein, 8 aa, Artificial Sequence
  Peptide Derived from Human Papillomavirus
FILRRRRK

SEQ ID NO: 36955 - protein, 9 aa, Artificial Sequence
  Peptide Derived from Human Papillomavirus
FILRRRRKR

SEQ ID NO: 36956 - protein, 10 aa, Artificial Sequence
  Peptide Derived from Human Papillomavirus
FILRRRRKRF

SEQ ID NO: 36957 - protein, 8 aa, Artificial Sequence
  Peptide Derived from Human Papillomavirus
FLDIIALH

SEQ ID NO: 36958 - protein, 9 aa, Artificial Sequence
  Peptide Derived from Human Papillomavirus
FLDIIALHR

SEQ ID NO: 36959 - protein, 11 aa, Artificial Sequence
  Peptide Derived from Human Papillomavirus
FLDIIALHRPA

SEQ ID NO: 36960 - protein, 11 aa, Artificial Sequence
  Peptide Derived from Human Papillomavirus
FLTSPHKLITY

SEQ ID NO: 36961 - protein, 8 aa, Artificial Sequence
  Peptide Derived from Human Papillomavirus
FSRVGQKA

SEQ ID NO: 36962 - protein, 11 aa, Artificial Sequence
  Peptide Derived from Human Papillomavirus
FSRVGQKATLK

SEQ ID NO: 36963 - protein, 11 aa, Artificial Sequence
  Peptide Derived from Human Papillomavirus
FSSPTVSTQSY

SEQ ID NO: 36964 - protein, 8 aa, Artificial Sequence
  Peptide Derived from Human Papillomavirus
FTDVRVAA

SEQ ID NO: 36965 - protein, 8 aa, Artificial Sequence
  Peptide Derived from Human Papillomavirus
FTEPSVLH

SEQ ID NO: 36966 - protein, 11 aa, Artificial Sequence
  Peptide Derived from Human Papillomavirus
FTEPSVLHPPA

SEQ ID NO: 36967 - protein, 8 aa, Artificial Sequence
  Peptide Derived from Human Papillomavirus
FVLHPSYF

SEQ ID NO: 36968 - protein, 11 aa, Artificial Sequence
  Peptide Derived from Human Papillomavirus
FVLHPSYFILR

SEQ ID NO: 36969 - protein, 8 aa, Artificial Sequence
  Peptide Derived from Human Papillomavirus
FVPISPFF

SEQ ID NO: 36970 - protein, 10 aa, Artificial Sequence
  Peptide Derived from Human Papillomavirus
FVPISPFFPF

SEQ ID NO: 36971 - protein, 10 aa, Artificial Sequence
  Peptide Derived from Human Papillomavirus
GADFVLHPSY

SEQ ID NO: 36972 - protein, 11 aa, Artificial Sequence
  Peptide Derived from Human Papillomavirus
GADFVLHPSYF

SEQ ID NO: 36973 - protein, 8 aa, Artificial Sequence
  Peptide Derived from Human Papillomavirus
GFDVTTSA

SEQ ID NO: 36974 - protein, 11 aa, Artificial Sequence
  Peptide Derived from Human Papillomavirus
GIGTGSGSGGR

SEQ ID NO: 36975 - protein, 11 aa, Artificial Sequence
  Peptide Derived from Human Papillomavirus
GLYSRNTQQVK

SEQ ID NO: 36976 - protein, 8 aa, Artificial Sequence
  Peptide Derived from Human Papillomavirus
GSGGRTGY

SEQ ID NO: 36977 - protein, 10 aa, Artificial Sequence
  Peptide Derived from Human Papillomavirus
GSGSGGRTGY

SEQ ID NO: 36978 - protein, 11 aa, Artificial Sequence
  Peptide Derived from Human Papillomavirus
GSRPVARLGLY

SEQ ID NO: 36979 - protein, 10 aa, Artificial Sequence
  Peptide Derived from Human Papillomavirus
GSTIADQILK

SEQ ID NO: 36980 - protein, 11 aa, Artificial Sequence
  Peptide Derived from Human Papillomavirus
GSTIADQILKY

SEQ ID NO: 36981 - protein, 10 aa, Artificial Sequence
  Peptide Derived from Human Papillomavirus
GTCPPDVIPK

SEQ ID NO: 36982 - protein, 8 aa, Artificial Sequence
  Peptide Derived from Human Papillomavirus
GTDPPTAA

SEQ ID NO: 36983 - protein, 9 aa, Artificial Sequence
  Peptide Derived from Human Papillomavirus
GTGSGSGGR

SEQ ID NO: 36984 - protein, 8 aa, Artificial Sequence
  Peptide Derived from Human Papillomavirus
HDTSTSSY

SEQ ID NO: 36985 - protein, 10 aa, Artificial Sequence
  Peptide Derived from Human Papillomavirus
HSYSTFATTR

SEQ ID NO: 36986 - protein, 8 aa, Artificial Sequence
  Peptide Derived from Human Papillomavirus
HTPMQHSY

SEQ ID NO: 36987 - protein, 11 aa, Artificial Sequence
  Peptide Derived from Human Papillomavirus
HTPMQHSYSTF

SEQ ID NO: 36988 - protein, 8 aa, Artificial Sequence
  Peptide Derived from Human Papillomavirus
HTVPNEQY

SEQ ID NO: 36989 - protein, 11 aa, Artificial Sequence
  Peptide Derived from Human Papillomavirus
HTVRFSRVGQK

SEQ ID NO: 36990 - protein, 8 aa, Artificial Sequence
  Peptide Derived from Human Papillomavirus
IADQILKY

SEQ ID NO: 36991 - protein, 11 aa, Artificial Sequence
  Peptide Derived from Human Papillomavirus
IALHRPAITSR

SEQ ID NO: 36992 - protein, 8 aa, Artificial Sequence
  Peptide Derived from Human Papillomavirus
IGARIHYY

SEQ ID NO: 36993 - protein, 8 aa, Artificial Sequence
  Peptide Derived from Human Papillomavirus
IGTDPPTA

SEQ ID NO: 36994 - protein, 9 aa, Artificial Sequence
  Peptide Derived from Human Papillomavirus
IGTDPPTAA

SEQ ID NO: 36995 - protein, 10 aa, Artificial Sequence
  Peptide Derived from Human Papillomavirus
IGTGSGSGGR

SEQ ID NO: 36996 - protein, 8 aa, Artificial Sequence
  Peptide Derived from Human Papillomavirus
IIALHRPA

SEQ ID NO: 36997 - protein, 10 aa, Artificial Sequence
  Peptide Derived from Human Papillomavirus
ILKYGSLGVF

SEQ ID NO: 36998 - protein, 11 aa, Artificial Sequence
  Peptide Derived from Human Papillomavirus
ILKYGSLGVFF

SEQ ID NO: 36999 - protein, 8 aa, Artificial Sequence
  Peptide Derived from Human Papillomavirus
ILRRRRKR

SEQ ID NO: 37000 - protein, 9 aa, Artificial Sequence
  Peptide Derived from Human Papillomavirus
ILRRRRKRF

SEQ ID NO: 37001 - protein, 11 aa, Artificial Sequence
  Peptide Derived from Human Papillomavirus
ILRRRRKRFPY

SEQ ID NO: 37002 - protein, 9 aa, Artificial Sequence
  Peptide Derived from Human Papillomavirus
ISPAPDPDF

SEQ ID NO: 37003 - protein, 9 aa, Artificial Sequence
  Peptide Derived from Human Papillomavirus
ISTHLNPTF

SEQ ID NO: 37004 - protein, 9 aa, Artificial Sequence
  Peptide Derived from Human Papillomavirus
ITSRRHTVR

SEQ ID NO: 37005 - protein, 10 aa, Artificial Sequence
  Peptide Derived from Human Papillomavirus
ITSRRHTVRF

SEQ ID NO: 37006 - protein, 8 aa, Artificial Sequence
  Peptide Derived from Human Papillomavirus
ITYDNPAF

SEQ ID NO: 37007 - protein, 11 aa, Artificial Sequence
  Peptide Derived from Human Papillomavirus
ITYDNPAFESF

SEQ ID NO: 37008 - protein, 10 aa, Artificial Sequence
  Peptide Derived from Human Papillomavirus
IVSLIEETSF

SEQ ID NO: 37009 - protein, 8 aa, Artificial Sequence
  Peptide Derived from Human Papillomavirus
IVVDGADF

SEQ ID NO: 37010 - protein, 11 aa, Artificial Sequence
  Peptide Derived from Human Papillomavirus
IVVDGADFVLH

SEQ ID NO: 37011 - protein, 10 aa, Artificial Sequence
  Peptide Derived from Human Papillomavirus
KATLKTRSGK

SEQ ID NO: 37012 - protein, 9 aa, Artificial Sequence
  Peptide Derived from Human Papillomavirus
KLITYDNPA

SEQ ID NO: 37013 - protein, 10 aa, Artificial Sequence
  Peptide Derived from Human Papillomavirus
KLITYDNPAF

SEQ ID NO: 37014 - protein, 10 aa, Artificial Sequence
  Peptide Derived from Human Papillomavirus
KTRSGKQIGA

SEQ ID NO: 37015 - protein, 11 aa, Artificial Sequence
  Peptide Derived from Human Papillomavirus
KTRSGKQIGAR

SEQ ID NO: 37016 - protein, 8 aa, Artificial Sequence
  Peptide Derived from Human Papillomavirus
KVEGSTIA

SEQ ID NO: 37017 - protein, 10 aa, Artificial Sequence
  Peptide Derived from Human Papillomavirus
LDHTVPNEQY

SEQ ID NO: 37018 - protein, 8 aa, Artificial Sequence
  Peptide Derived from Human Papillomavirus
LDIIALHR

SEQ ID NO: 37019 - protein, 10 aa, Artificial Sequence
  Peptide Derived from Human Papillomavirus
LDIIALHRPA

SEQ ID NO: 37020 - protein, 8 aa, Artificial Sequence
  Peptide Derived from Human Papillomavirus
LFPTSSPF

SEQ ID NO: 37021 - protein, 10 aa, Artificial Sequence
  Peptide Derived from Human Papillomavirus
LIEETSFIEA

SEQ ID NO: 37022 - protein, 8 aa, Artificial Sequence
  Peptide Derived from Human Papillomavirus
LITYDNPA

SEQ ID NO: 37023 - protein, 9 aa, Artificial Sequence
  Peptide Derived from Human Papillomavirus
LITYDNPAF

SEQ ID NO: 37024 - protein, 9 aa, Artificial Sequence
  Peptide Derived from Human Papillomavirus
LSPIVPLDH

SEQ ID NO: 37025 - protein, 10 aa, Artificial Sequence
  Peptide Derived from Human Papillomavirus
LTSPHKLITY

SEQ ID NO: 37026 - protein, 11 aa, Artificial Sequence
  Peptide Derived from Human Papillomavirus
MSGPDIPSPLF

SEQ ID NO: 37027 - protein, 8 aa, Artificial Sequence
  Peptide Derived from Human Papillomavirus
NDGLYDVY

SEQ ID NO: 37028 - protein, 9 aa, Artificial Sequence
  Peptide Derived from Human Papillomavirus
NDGLYDVYA

SEQ ID NO: 37029 - protein, 11 aa, Artificial Sequence
  Peptide Derived from Human Papillomavirus
NTQQVKVVDPA

SEQ ID NO: 37030 - protein, 8 aa, Artificial Sequence
  Peptide Derived from Human Papillomavirus
NVHTPMQH

SEQ ID NO: 37031 - protein, 10 aa, Artificial Sequence
  Peptide Derived from Human Papillomavirus
NVHTPMQHSY

SEQ ID NO: 37032 - protein, 10 aa, Artificial Sequence
  Peptide Derived from Human Papillomavirus
NVSIPLNTGF

SEQ ID NO: 37033 - protein, 8 aa, Artificial Sequence
  Peptide Derived from Human Papillomavirus
PAEASGHF

SEQ ID NO: 37034 - protein, 10 aa, Artificial Sequence
  Peptide Derived from Human Papillomavirus
PAEASGHFIF

SEQ ID NO: 37035 - protein, 8 aa, Artificial Sequence
  Peptide Derived from Human Papillomavirus
PAFLTSPH

SEQ ID NO: 37036 - protein, 9 aa, Artificial Sequence
  Peptide Derived from Human Papillomavirus
PAFLTSPHK

SEQ ID NO: 37037 - protein, 8 aa, Artificial Sequence
  Peptide Derived from Human Papillomavirus
PAITSRRH

SEQ ID NO: 37038 - protein, 11 aa, Artificial Sequence
  Peptide Derived from Human Papillomavirus
PAITSRRHTVR

SEQ ID NO: 37039 - protein, 9 aa, Artificial Sequence
  Peptide Derived from Human Papillomavirus
PAPAEASGH

SEQ ID NO: 37040 - protein, 10 aa, Artificial Sequence
  Peptide Derived from Human Papillomavirus
PAPAEASGHF

SEQ ID NO: 37041 - protein, 11 aa, Artificial Sequence
  Peptide Derived from Human Papillomavirus
PAPSIPTPSGF

SEQ ID NO: 37042 - protein, 8 aa, Artificial Sequence
  Peptide Derived from Human Papillomavirus
PDFLDIIA

SEQ ID NO: 37043 - protein, 10 aa, Artificial Sequence
  Peptide Derived from Human Papillomavirus
PDFLDIIALH

SEQ ID NO: 37044 - protein, 11 aa, Artificial Sequence
  Peptide Derived from Human Papillomavirus
PDFLDIIALHR

SEQ ID NO: 37045 - protein, 8 aa, Artificial Sequence
  Peptide Derived from Human Papillomavirus
PDIPSPLF

SEQ ID NO: 37046 - protein, 10 aa, Artificial Sequence
  Peptide Derived from Human Papillomavirus
PDPDFLDIIA

SEQ ID NO: 37047 - protein, 10 aa, Artificial Sequence
  Peptide Derived from Human Papillomavirus
PFDTIVVDGA

SEQ ID NO: 37048 - protein, 8 aa, Artificial Sequence
  Peptide Derived from Human Papillomavirus
PFVPISPF

SEQ ID NO: 37049 - protein, 9 aa, Artificial Sequence
  Peptide Derived from Human Papillomavirus
PFVPISPFF

SEQ ID NO: 37050 - protein, 11 aa, Artificial Sequence
  Peptide Derived from Human Papillomavirus
PFVPISPFFPF

SEQ ID NO: 37051 - protein, 8 aa, Artificial Sequence
  Peptide Derived from Human Papillomavirus
PGSRPVAR

SEQ ID NO: 37052 - protein, 9 aa, Artificial Sequence
  Peptide Derived from Human Papillomavirus
PIGTDPPTA

SEQ ID NO: 37053 - protein, 10 aa, Artificial Sequence
  Peptide Derived from Human Papillomavirus
PIGTDPPTAA

SEQ ID NO: 37054 - protein, 9 aa, Artificial Sequence
  Peptide Derived from Human Papillomavirus
PIPGSRPVA

SEQ ID NO: 37055 - protein, 10 aa, Artificial Sequence
  Peptide Derived from Human Papillomavirus
PIPGSRPVAR

SEQ ID NO: 37056 - protein, 8 aa, Artificial Sequence
  Peptide Derived from Human Papillomavirus
PISPFFPF

SEQ ID NO: 37057 - protein, 11 aa, Artificial Sequence
  Peptide Derived from Human Papillomavirus
PLDHTVPNEQY

SEQ ID NO: 37058 - protein, 9 aa, Artificial Sequence
  Peptide Derived from Human Papillomavirus
PLFPTSSPF

SEQ ID NO: 37059 - protein, 10 aa, Artificial Sequence
  Peptide Derived from Human Papillomavirus
PLHDTSTSSY

SEQ ID NO: 37060 - protein, 9 aa, Artificial Sequence
  Peptide Derived from Human Papillomavirus
PMQHSYSTF

SEQ ID NO: 37061 - protein, 10 aa, Artificial Sequence
  Peptide Derived from Human Papillomavirus
PMQHSYSTFA

SEQ ID NO: 37062 - protein, 10 aa, Artificial Sequence
  Peptide Derived from Human Papillomavirus
PSGFDVTTSA

SEQ ID NO: 37063 - protein, 9 aa, Artificial Sequence
  Peptide Derived from Human Papillomavirus
PSIPTPSGF

SEQ ID NO: 37064 - protein, 11 aa, Artificial Sequence
  Peptide Derived from Human Papillomavirus
PSPLFPTSSPF

SEQ ID NO: 37065 - protein, 8 aa, Artificial Sequence
  Peptide Derived from Human Papillomavirus
PSVLHPPA

SEQ ID NO: 37066 - protein, 10 aa, Artificial Sequence
  Peptide Derived from Human Papillomavirus
PSVLHPPAPA

SEQ ID NO: 37067 - protein, 8 aa, Artificial Sequence
  Peptide Derived from Human Papillomavirus
PSYFILRR

SEQ ID NO: 37068 - protein, 9 aa, Artificial Sequence
  Peptide Derived from Human Papillomavirus
PSYFILRRR

SEQ ID NO: 37069 - protein, 10 aa, Artificial Sequence
  Peptide Derived from Human Papillomavirus
PSYFILRRRR

SEQ ID NO: 37070 - protein, 11 aa, Artificial Sequence
  Peptide Derived from Human Papillomavirus
PSYFILRRRRK

SEQ ID NO: 37071 - protein, 11 aa, Artificial Sequence
  Peptide Derived from Human Papillomavirus
PTAAIPLQPIR

SEQ ID NO: 37072 - protein, 10 aa, Artificial Sequence
  Peptide Derived from Human Papillomavirus
PTFTEPSVLH

SEQ ID NO: 37073 - protein, 8 aa, Artificial Sequence
  Peptide Derived from Human Papillomavirus
PTVSTQSY

SEQ ID NO: 37074 - protein, 8 aa, Artificial Sequence
  Peptide Derived from Human Papillomavirus
PVARLGLY

SEQ ID NO: 37075 - protein, 10 aa, Artificial Sequence
  Peptide Derived from Human Papillomavirus
PVARLGLYSR

SEQ ID NO: 37076 - protein, 11 aa, Artificial Sequence
  Peptide Derived from Human Papillomavirus
QDLSPIVPLDH

SEQ ID NO: 37077 - protein, 10 aa, Artificial Sequence
  Peptide Derived from Human Papillomavirus
QFQHSDISPA

SEQ ID NO: 37078 - protein, 8 aa, Artificial Sequence
  Peptide Derived from Human Papillomavirus
QIGARIHY

SEQ ID NO: 37079 - protein, 9 aa, Artificial Sequence
  Peptide Derived from Human Papillomavirus
QIGARIHYY

SEQ ID NO: 37080 - protein, 11 aa, Artificial Sequence
  Peptide Derived from Human Papillomavirus
QILKYGSLGVF

SEQ ID NO: 37081 - protein, 8 aa, Artificial Sequence
  Peptide Derived from Human Papillomavirus
QLYQTCKA

SEQ ID NO: 37082 - protein, 11 aa, Artificial Sequence
  Peptide Derived from Human Papillomavirus
QSYENIPMDTF

SEQ ID NO: 37083 - protein, 11 aa, Artificial Sequence
  Peptide Derived from Human Papillomavirus
QTISTHLNPTF

SEQ ID NO: 37084 - protein, 8 aa, Artificial Sequence
  Peptide Derived from Human Papillomavirus
QVKVVDPA

SEQ ID NO: 37085 - protein, 9 aa, Artificial Sequence
  Peptide Derived from Human Papillomavirus
QVKVVDPAF

SEQ ID NO: 37086 - protein, 8 aa, Artificial Sequence
  Peptide Derived from Human Papillomavirus
RASATQLY

SEQ ID NO: 37087 - protein, 10 aa, Artificial Sequence
  Peptide Derived from Human Papillomavirus
RFPYFFTDVR

SEQ ID NO: 37088 - protein, 8 aa, Artificial Sequence
  Peptide Derived from Human Papillomavirus
RFSRVGQK

SEQ ID NO: 37089 - protein, 9 aa, Artificial Sequence
  Peptide Derived from Human Papillomavirus
RFSRVGQKA

SEQ ID NO: 37090 - protein, 8 aa, Artificial Sequence
  Peptide Derived from Human Papillomavirus
RSGKQIGA

SEQ ID NO: 37091 - protein, 9 aa, Artificial Sequence
  Peptide Derived from Human Papillomavirus
RSGKQIGAR

SEQ ID NO: 37092 - protein, 11 aa, Artificial Sequence
  Peptide Derived from Human Papillomavirus
RSGKQIGARIH

SEQ ID NO: 37093 - protein, 8 aa, Artificial Sequence
  Peptide Derived from Human Papillomavirus
RSTRRKRA

SEQ ID NO: 37094 - protein, 10 aa, Artificial Sequence
  Peptide Derived from Human Papillomavirus
RSTRRKRASA

SEQ ID NO: 37095 - protein, 9 aa, Artificial Sequence
  Peptide Derived from Human Papillomavirus
RVGQKATLK

SEQ ID NO: 37096 - protein, 11 aa, Artificial Sequence
  Peptide Derived from Human Papillomavirus
RVGQKATLKTR

SEQ ID NO: 37097 - protein, 10 aa, Artificial Sequence
  Peptide Derived from Human Papillomavirus
SATQLYQTCK

SEQ ID NO: 37098 - protein, 11 aa, Artificial Sequence
  Peptide Derived from Human Papillomavirus
SATQLYQTCKA

SEQ ID NO: 37099 - protein, 11 aa, Artificial Sequence
  Peptide Derived from Human Papillomavirus
SDISPAPDPDF

SEQ ID NO: 37100 - protein, 10 aa, Artificial Sequence
  Peptide Derived from Human Papillomavirus
SFDPEDTLQF

SEQ ID NO: 37101 - protein, 9 aa, Artificial Sequence
  Peptide Derived from Human Papillomavirus
SFIEAGAPA

SEQ ID NO: 37102 - protein, 9 aa, Artificial Sequence
  Peptide Derived from Human Papillomavirus
SGFDVTTSA

SEQ ID NO: 37103 - protein, 8 aa, Artificial Sequence
  Peptide Derived from Human Papillomavirus
SGKQIGAR

SEQ ID NO: 37104 - protein, 10 aa, Artificial Sequence
  Peptide Derived from Human Papillomavirus
SGKQIGARIH

SEQ ID NO: 37105 - protein, 11 aa, Artificial Sequence
  Peptide Derived from Human Papillomavirus
SGKQIGARIHY

SEQ ID NO: 37106 - protein, 10 aa, Artificial Sequence
  Peptide Derived from Human Papillomavirus
SGPDIPSPLF

SEQ ID NO: 37107 - protein, 9 aa, Artificial Sequence
  Peptide Derived from Human Papillomavirus
SGSGGRTGY

SEQ ID NO: 37108 - protein, 10 aa, Artificial Sequence
  Peptide Derived from Human Papillomavirus
SINDGLYDVY

SEQ ID NO: 37109 - protein, 11 aa, Artificial Sequence
  Peptide Derived from Human Papillomavirus
SINDGLYDVYA

SEQ ID NO: 37110 - protein, 8 aa, Artificial Sequence
  Peptide Derived from Human Papillomavirus
SIPLNTGF

SEQ ID NO: 37111 - protein, 8 aa, Artificial Sequence
  Peptide Derived from Human Papillomavirus
SIPTPSGF

SEQ ID NO: 37112 - protein, 8 aa, Artificial Sequence
  Peptide Derived from Human Papillomavirus
SIQTISTH

SEQ ID NO: 37113 - protein, 11 aa, Artificial Sequence
  Peptide Derived from Human Papillomavirus
SIVSLIEETSF

SEQ ID NO: 37114 - protein, 8 aa, Artificial Sequence
  Peptide Derived from Human Papillomavirus
SLIEETSF

SEQ ID NO: 37115 - protein, 11 aa, Artificial Sequence
  Peptide Derived from Human Papillomavirus
SLIEETSFIEA

SEQ ID NO: 37116 - protein, 9 aa, Artificial Sequence
  Peptide Derived from Human Papillomavirus
SSIQTISTH

SEQ ID NO: 37117 - protein, 10 aa, Artificial Sequence
  Peptide Derived from Human Papillomavirus
SSPFVPISPF

SEQ ID NO: 37118 - protein, 11 aa, Artificial Sequence
  Peptide Derived from Human Papillomavirus
SSPFVPISPFF

SEQ ID NO: 37119 - protein, 10 aa, Artificial Sequence
  Peptide Derived from Human Papillomavirus
SSPTVSTQSY

SEQ ID NO: 37120 - protein, 9 aa, Artificial Sequence
  Peptide Derived from Human Papillomavirus
SSTPIPGSR

SEQ ID NO: 37121 - protein, 10 aa, Artificial Sequence
  Peptide Derived from Human Papillomavirus
SSYSINDGLY

SEQ ID NO: 37122 - protein, 8 aa, Artificial Sequence
  Peptide Derived from Human Papillomavirus
STHLNPTF

SEQ ID NO: 37123 - protein, 9 aa, Artificial Sequence
  Peptide Derived from Human Papillomavirus
STIADQILK

SEQ ID NO: 37124 - protein, 10 aa, Artificial Sequence
  Peptide Derived from Human Papillomavirus
STIADQILKY

SEQ ID NO: 37125 - protein, 8 aa, Artificial Sequence
  Peptide Derived from Human Papillomavirus
STPIPGSR

SEQ ID NO: 37126 - protein, 11 aa, Artificial Sequence
  Peptide Derived from Human Papillomavirus
STPIPGSRPVA

SEQ ID NO: 37127 - protein, 9 aa, Artificial Sequence
  Peptide Derived from Human Papillomavirus
STRRKRASA

SEQ ID NO: 37128 - protein, 9 aa, Artificial Sequence
  Peptide Derived from Human Papillomavirus
SVLHPPAPA

SEQ ID NO: 37129 - protein, 11 aa, Artificial Sequence
  Peptide Derived from Human Papillomavirus
SVLHPPAPAEA

SEQ ID NO: 37130 - protein, 10 aa, Artificial Sequence
  Peptide Derived from Human Papillomavirus
TAAIPLQPIR

SEQ ID NO: 37131 - protein, 9 aa, Artificial Sequence
  Peptide Derived from Human Papillomavirus
TCPPDVIPK

SEQ ID NO: 37132 - protein, 9 aa, Artificial Sequence
  Peptide Derived from Human Papillomavirus
TFTEPSVLH

SEQ ID NO: 37133 - protein, 8 aa, Artificial Sequence
  Peptide Derived from Human Papillomavirus
TGSGSGGR

SEQ ID NO: 37134 - protein, 11 aa, Artificial Sequence
  Peptide Derived from Human Papillomavirus
TGSGSGGRTGY

SEQ ID NO: 37135 - protein, 11 aa, Artificial Sequence
  Peptide Derived from Human Papillomavirus
TGTCPPDVIPK

SEQ ID NO: 37136 - protein, 8 aa, Artificial Sequence
  Peptide Derived from Human Papillomavirus
TIADQILK

SEQ ID NO: 37137 - protein, 9 aa, Artificial Sequence
  Peptide Derived from Human Papillomavirus
TIADQILKY

SEQ ID NO: 37138 - protein, 10 aa, Artificial Sequence
  Peptide Derived from Human Papillomavirus
TISTHLNPTF

SEQ ID NO: 37139 - protein, 9 aa, Artificial Sequence
  Peptide Derived from Human Papillomavirus
TIVVDGADF

SEQ ID NO: 37140 - protein, 8 aa, Artificial Sequence
  Peptide Derived from Human Papillomavirus
TLKTRSGK

SEQ ID NO: 37141 - protein, 8 aa, Artificial Sequence
  Peptide Derived from Human Papillomavirus
TSADTTPA

SEQ ID NO: 37142 - protein, 8 aa, Artificial Sequence
  Peptide Derived from Human Papillomavirus
TSFIEAGA

SEQ ID NO: 37143 - protein, 10 aa, Artificial Sequence
  Peptide Derived from Human Papillomavirus
TSFIEAGAPA

SEQ ID NO: 37144 - protein, 9 aa, Artificial Sequence
  Peptide Derived from Human Papillomavirus
TSPHKLITY

SEQ ID NO: 37145 - protein, 8 aa, Artificial Sequence
  Peptide Derived from Human Papillomavirus
TSRRHTVR

SEQ ID NO: 37146 - protein, 9 aa, Artificial Sequence
  Peptide Derived from Human Papillomavirus
TSRRHTVRF

SEQ ID NO: 37147 - protein, 11 aa, Artificial Sequence
  Peptide Derived from Human Papillomavirus
TSRRHTVRFSR

SEQ ID NO: 37148 - protein, 11 aa, Artificial Sequence
  Peptide Derived from Human Papillomavirus
TSSPFVPISPF

SEQ ID NO: 37149 - protein, 10 aa, Artificial Sequence
  Peptide Derived from Human Papillomavirus
TSSTPIPGSR

SEQ ID NO: 37150 - protein, 11 aa, Artificial Sequence
  Peptide Derived from Human Papillomavirus
TSSYSINDGLY

SEQ ID NO: 37151 - protein, 9 aa, Artificial Sequence
  Peptide Derived from Human Papillomavirus
TTSADTTPA

SEQ ID NO: 37152 - protein, 10 aa, Artificial Sequence
  Peptide Derived from Human Papillomavirus
TVRFSRVGQK

SEQ ID NO: 37153 - protein, 11 aa, Artificial Sequence
  Peptide Derived from Human Papillomavirus
TVRFSRVGQKA

SEQ ID NO: 37154 - protein, 9 aa, Artificial Sequence
  Peptide Derived from Human Papillomavirus
VARLGLYSR

SEQ ID NO: 37155 - protein, 9 aa, Artificial Sequence
  Peptide Derived from Human Papillomavirus
VDGADFVLH

SEQ ID NO: 37156 - protein, 10 aa, Artificial Sequence
  Peptide Derived from Human Papillomavirus
VDNVHTPMQH

SEQ ID NO: 37157 - protein, 10 aa, Artificial Sequence
  Peptide Derived from Human Papillomavirus
VDPAFLTSPH

SEQ ID NO: 37158 - protein, 11 aa, Artificial Sequence
  Peptide Derived from Human Papillomavirus
VDPAFLTSPHK

SEQ ID NO: 37159 - protein, 8 aa, Artificial Sequence
  Peptide Derived from Human Papillomavirus
VGQKATLK

SEQ ID NO: 37160 - protein, 10 aa, Artificial Sequence
  Peptide Derived from Human Papillomavirus
VGQKATLKTR

SEQ ID NO: 37161 - protein, 11 aa, Artificial Sequence
  Peptide Derived from Human Papillomavirus
VIPKVEGSTIA

SEQ ID NO: 37162 - protein, 8 aa, Artificial Sequence
  Peptide Derived from Human Papillomavirus
VLHPPAPA

SEQ ID NO: 37163 - protein, 10 aa, Artificial Sequence
  Peptide Derived from Human Papillomavirus
VLHPPAPAEA

SEQ ID NO: 37164 - protein, 10 aa, Artificial Sequence
  Peptide Derived from Human Papillomavirus
VLHPSYFILR

SEQ ID NO: 37165 - protein, 11 aa, Artificial Sequence
  Peptide Derived from Human Papillomavirus
VLHPSYFILRR

SEQ ID NO: 37166 - protein, 9 aa, Artificial Sequence
  Peptide Derived from Human Papillomavirus
VSIPLNTGF

SEQ ID NO: 37167 - protein, 9 aa, Artificial Sequence
  Peptide Derived from Human Papillomavirus
VSLIEETSF

SEQ ID NO: 37168 - protein, 11 aa, Artificial Sequence
  Peptide Derived from Human Papillomavirus
VTSSTPIPGSR

SEQ ID NO: 37169 - protein, 10 aa, Artificial Sequence
  Peptide Derived from Human Papillomavirus
VTTSADTTPA

SEQ ID NO: 37170 - protein, 10 aa, Artificial Sequence
  Peptide Derived from Human Papillomavirus
VVDGADFVLH

SEQ ID NO: 37171 - protein, 11 aa, Artificial Sequence
  Peptide Derived from Human Papillomavirus
VVDPAFLTSPH

SEQ ID NO: 37172 - protein, 9 aa, Artificial Sequence
  Peptide Derived from Human Papillomavirus
YADDVDNVH

SEQ ID NO: 37173 - protein, 9 aa, Artificial Sequence
  Peptide Derived from Human Papillomavirus
YDNPAFESF

SEQ ID NO: 37174 - protein, 9 aa, Artificial Sequence
  Peptide Derived from Human Papillomavirus
YFFTDVRVA

SEQ ID NO: 37175 - protein, 10 aa, Artificial Sequence
  Peptide Derived from Human Papillomavirus
YFFTDVRVAA

SEQ ID NO: 37176 - protein, 8 aa, Artificial Sequence
  Peptide Derived from Human Papillomavirus
YFILRRRR

SEQ ID NO: 37177 - protein, 9 aa, Artificial Sequence
  Peptide Derived from Human Papillomavirus
YFILRRRRK

SEQ ID NO: 37178 - protein, 10 aa, Artificial Sequence
  Peptide Derived from Human Papillomavirus
YFILRRRRKR

SEQ ID NO: 37179 - protein, 11 aa, Artificial Sequence
  Peptide Derived from Human Papillomavirus
YFILRRRRKRF

SEQ ID NO: 37180 - protein, 8 aa, Artificial Sequence
  Peptide Derived from Human Papillomavirus
YGSLGVFF

SEQ ID NO: 37181 - protein, 8 aa, Artificial Sequence
  Peptide Derived from Human Papillomavirus
YSINDGLY

SEQ ID NO: 37182 - protein, 11 aa, Artificial Sequence
  Peptide Derived from Human Papillomavirus
YSINDGLYDVY

SEQ ID NO: 37183 - protein, 9 aa, Artificial Sequence
  Peptide Derived from Human Papillomavirus
YSRNTQQVK

SEQ ID NO: 37184 - protein, 8 aa, Artificial Sequence
  Peptide Derived from Human Papillomavirus
YSTFATTR

SEQ ID NO: 37185 - protein, 11 aa, Artificial Sequence
  Peptide Derived from Human Papillomavirus
YVPIGTDPPTA

SEQ ID NO: 37186 - protein, 11 aa, Artificial Sequence
  Peptide Derived from Human Papillomavirus
AAAFLKSNCQA

SEQ ID NO: 37187 - protein, 10 aa, Artificial Sequence
  Peptide Derived from Human Papillomavirus
AAFLKSNCQA

SEQ ID NO: 37188 - protein, 11 aa, Artificial Sequence
  Peptide Derived from Human Papillomavirus
AAFLKSNCQAK

SEQ ID NO: 37189 - protein, 8 aa, Artificial Sequence
  Peptide Derived from Human Papillomavirus
AAMLAVFK

SEQ ID NO: 37190 - protein, 11 aa, Artificial Sequence
  Peptide Derived from Human Papillomavirus
AAMLAVFKDIY

SEQ ID NO: 37191 - protein, 8 aa, Artificial Sequence
  Peptide Derived from Human Papillomavirus
ADCNSNAA

SEQ ID NO: 37192 - protein, 9 aa, Artificial Sequence
  Peptide Derived from Human Papillomavirus
ADCNSNAAA

SEQ ID NO: 37193 - protein, 10 aa, Artificial Sequence
  Peptide Derived from Human Papillomavirus
ADCNSNAAAF

SEQ ID NO: 37194 - protein, 8 aa, Artificial Sequence
  Peptide Derived from Human Papillomavirus
ADTEGIPF

SEQ ID NO: 37195 - protein, 11 aa, Artificial Sequence
  Peptide Derived from Human Papillomavirus
ADTEGIPFGTF

SEQ ID NO: 37196 - protein, 11 aa, Artificial Sequence
  Peptide Derived from Human Papillomavirus
ADTKVAMLDDA

SEQ ID NO: 37197 - protein, 9 aa, Artificial Sequence
  Peptide Derived from Human Papillomavirus
AFLKSNCQA

SEQ ID NO: 37198 - protein, 10 aa, Artificial Sequence
  Peptide Derived from Human Papillomavirus
AFLKSNCQAK

SEQ ID NO: 37199 - protein, 11 aa, Artificial Sequence
  Peptide Derived from Human Papillomavirus
AFLKSNCQAKY

SEQ ID NO: 37200 - protein, 8 aa, Artificial Sequence
  Peptide Derived from Human Papillomavirus
AFQYAQLA

SEQ ID NO: 37201 - protein, 10 aa, Artificial Sequence
  Peptide Derived from Human Papillomavirus
AIFGVNPTVA

SEQ ID NO: 37202 - protein, 11 aa, Artificial Sequence
  Peptide Derived from Human Papillomavirus
AIISFVNSNSH

SEQ ID NO: 37203 - protein, 11 aa, Artificial Sequence
  Peptide Derived from Human Papillomavirus
ALDGNPISIDR

SEQ ID NO: 37204 - protein, 11 aa, Artificial Sequence
  Peptide Derived from Human Papillomavirus
ALKEFLKGTPK

SEQ ID NO: 37205 - protein, 9 aa, Artificial Sequence
  Peptide Derived from Human Papillomavirus
ALLRYKCGK

SEQ ID NO: 37206 - protein, 11 aa, Artificial Sequence
  Peptide Derived from Human Papillomavirus
ALLRYKCGKNR

SEQ ID NO: 37207 - protein, 10 aa, Artificial Sequence
  Peptide Derived from Human Papillomavirus
AMLAVFKDIY

SEQ ID NO: 37208 - protein, 8 aa, Artificial Sequence
  Peptide Derived from Human Papillomavirus
AMLDDATH

SEQ ID NO: 37209 - protein, 10 aa, Artificial Sequence
  Peptide Derived from Human Papillomavirus
ASNKKAAMLA

SEQ ID NO: 37210 - protein, 11 aa, Artificial Sequence
  Peptide Derived from Human Papillomavirus
ATDTGSDMVDF

SEQ ID NO: 37211 - protein, 8 aa, Artificial Sequence
  Peptide Derived from Human Papillomavirus
ATHTCWTY

SEQ ID NO: 37212 - protein, 9 aa, Artificial Sequence
  Peptide Derived from Human Papillomavirus
ATHTCWTYF

SEQ ID NO: 37213 - protein, 11 aa, Artificial Sequence
  Peptide Derived from Human Papillomavirus
AVFKDIYGLSF

SEQ ID NO: 37214 - protein, 8 aa, Artificial Sequence
  Peptide Derived from Human Papillomavirus
AVMCRHYK

SEQ ID NO: 37215 - protein, 9 aa, Artificial Sequence
  Peptide Derived from Human Papillomavirus
AVMCRHYKR

SEQ ID NO: 37216 - protein, 10 aa, Artificial Sequence
  Peptide Derived from Human Papillomavirus
AVMCRHYKRA

SEQ ID NO: 37217 - protein, 8 aa, Artificial Sequence
  Peptide Derived from Human Papillomavirus
CAVMCRHY

SEQ ID NO: 37218 - protein, 9 aa, Artificial Sequence
  Peptide Derived from Human Papillomavirus
CAVMCRHYK

SEQ ID NO: 37219 - protein, 10 aa, Artificial Sequence
  Peptide Derived from Human Papillomavirus
CAVMCRHYKR

SEQ ID NO: 37220 - protein, 11 aa, Artificial Sequence
  Peptide Derived from Human Papillomavirus
CAVMCRHYKRA

SEQ ID NO: 37221 - protein, 9 aa, Artificial Sequence
  Peptide Derived from Human Papillomavirus
CFFERTWSR

SEQ ID NO: 37222 - protein, 9 aa, Artificial Sequence
  Peptide Derived from Human Papillomavirus
CGKNRLTVA

SEQ ID NO: 37223 - protein, 10 aa, Artificial Sequence
  Peptide Derived from Human Papillomavirus
CGKNRLTVAK

SEQ ID NO: 37224 - protein, 8 aa, Artificial Sequence
  Peptide Derived from Human Papillomavirus
CILLYGPA

SEQ ID NO: 37225 - protein, 8 aa, Artificial Sequence
  Peptide Derived from Human Papillomavirus
CMLIEPPK

SEQ ID NO: 37226 - protein, 10 aa, Artificial Sequence
  Peptide Derived from Human Papillomavirus
CMLIEPPKLR

SEQ ID NO: 37227 - protein, 11 aa, Artificial Sequence
  Peptide Derived from Human Papillomavirus
CSKIDEGGDWR

SEQ ID NO: 37228 - protein, 9 aa, Artificial Sequence
  Peptide Derived from Human Papillomavirus
CTDWVMAIF

SEQ ID NO: 37229 - protein, 8 aa, Artificial Sequence
  Peptide Derived from Human Papillomavirus
CVTGQNTR

SEQ ID NO: 37230 - protein, 9 aa, Artificial Sequence
  Peptide Derived from Human Papillomavirus
DADTEGIPF

SEQ ID NO: 37231 - protein, 9 aa, Artificial Sequence
  Peptide Derived from Human Papillomavirus
DAQVLHLLK

SEQ ID NO: 37232 - protein, 10 aa, Artificial Sequence
  Peptide Derived from Human Papillomavirus
DAQVLHLLKR

SEQ ID NO: 37233 - protein, 11 aa, Artificial Sequence
  Peptide Derived from Human Papillomavirus
DAQVLHLLKRK

SEQ ID NO: 37234 - protein, 9 aa, Artificial Sequence
  Peptide Derived from Human Papillomavirus
DATHTCWTY

SEQ ID NO: 37235 - protein, 10 aa, Artificial Sequence
  Peptide Derived from Human Papillomavirus
DATHTCWTYF

SEQ ID NO: 37236 - protein, 8 aa, Artificial Sequence
  Peptide Derived from Human Papillomavirus
DCAVMCRH

SEQ ID NO: 37237 - protein, 9 aa, Artificial Sequence
  Peptide Derived from Human Papillomavirus
DCAVMCRHY

SEQ ID NO: 37238 - protein, 10 aa, Artificial Sequence
  Peptide Derived from Human Papillomavirus
DCAVMCRHYK

SEQ ID NO: 37239 - protein, 11 aa, Artificial Sequence
  Peptide Derived from Human Papillomavirus
DCAVMCRHYKR

SEQ ID NO: 37240 - protein, 10 aa, Artificial Sequence
  Peptide Derived from Human Papillomavirus
DCKWGVLILA

SEQ ID NO: 37241 - protein, 8 aa, Artificial Sequence
  Peptide Derived from Human Papillomavirus
DCNSNAAA

SEQ ID NO: 37242 - protein, 9 aa, Artificial Sequence
  Peptide Derived from Human Papillomavirus
DCNSNAAAF

SEQ ID NO: 37243 - protein, 11 aa, Artificial Sequence
  Peptide Derived from Human Papillomavirus
DCNSNAAAFLK

SEQ ID NO: 37244 - protein, 10 aa, Artificial Sequence
  Peptide Derived from Human Papillomavirus
DDATHTCWTY

SEQ ID NO: 37245 - protein, 11 aa, Artificial Sequence
  Peptide Derived from Human Papillomavirus
DDATHTCWTYF

SEQ ID NO: 37246 - protein, 11 aa, Artificial Sequence
  Peptide Derived from Human Papillomavirus
DGEGTGCNGWF

SEQ ID NO: 37247 - protein, 9 aa, Artificial Sequence
  Peptide Derived from Human Papillomavirus
DGNPISIDR

SEQ ID NO: 37248 - protein, 10 aa, Artificial Sequence
  Peptide Derived from Human Papillomavirus
DGNPISIDRK

SEQ ID NO: 37249 - protein, 11 aa, Artificial Sequence
  Peptide Derived from Human Papillomavirus
DGNPISIDRKH

SEQ ID NO: 37250 - protein, 9 aa, Artificial Sequence
  Peptide Derived from Human Papillomavirus
DLHEDDEDA

SEQ ID NO: 37251 - protein, 9 aa, Artificial Sequence
  Peptide Derived from Human Papillomavirus
DLSDMVQWA

SEQ ID NO: 37252 - protein, 10 aa, Artificial Sequence
  Peptide Derived from Human Papillomavirus
DLSDMVQWAF

SEQ ID NO: 37253 - protein, 9 aa, Artificial Sequence
  Peptide Derived from Human Papillomavirus
DLTDESDMA

SEQ ID NO: 37254 - protein, 10 aa, Artificial Sequence
  Peptide Derived from Human Papillomavirus
DLTDESDMAF

SEQ ID NO: 37255 - protein, 10 aa, Artificial Sequence
  Peptide Derived from Human Papillomavirus
DLVRNFKSDK

SEQ ID NO: 37256 - protein, 10 aa, Artificial Sequence
  Peptide Derived from Human Papillomavirus
DMAFQYAQLA

SEQ ID NO: 37257 - protein, 11 aa, Artificial Sequence
  Peptide Derived from Human Papillomavirus
DSGYGCSEVEA

SEQ ID NO: 37258 - protein, 10 aa, Artificial Sequence
  Peptide Derived from Human Papillomavirus
DTEGIPFGTF

SEQ ID NO: 37259 - protein, 11 aa, Artificial Sequence
  Peptide Derived from Human Papillomavirus
DTEGIPFGTFK

SEQ ID NO: 37260 - protein, 9 aa, Artificial Sequence
  Peptide Derived from Human Papillomavirus
DTGSDMVDF

SEQ ID NO: 37261 - protein, 10 aa, Artificial Sequence
  Peptide Derived from Human Papillomavirus
DTKVAMLDDA

SEQ ID NO: 37262 - protein, 8 aa, Artificial Sequence
  Peptide Derived from Human Papillomavirus
DTPEWIQR

SEQ ID NO: 37263 - protein, 10 aa, Artificial Sequence
  Peptide Derived from Human Papillomavirus
DTQLSICEQA

SEQ ID NO: 37264 - protein, 11 aa, Artificial Sequence
  Peptide Derived from Human Papillomavirus
DVISDDEDETA

SEQ ID NO: 37265 - protein, 10 aa, Artificial Sequence
  Peptide Derived from Human Papillomavirus
EDADTEGIPF

SEQ ID NO: 37266 - protein, 8 aa, Artificial Sequence
  Peptide Derived from Human Papillomavirus
EFISFLRA

SEQ ID NO: 37267 - protein, 10 aa, Artificial Sequence
  Peptide Derived from Human Papillomavirus
EFISFLRALK

SEQ ID NO: 37268 - protein, 8 aa, Artificial Sequence
  Peptide Derived from Human Papillomavirus
EFLKGTPK

SEQ ID NO: 37269 - protein, 9 aa, Artificial Sequence
  Peptide Derived from Human Papillomavirus
EFLKGTPKK

SEQ ID NO: 37270 - protein, 8 aa, Artificial Sequence
  Peptide Derived from Human Papillomavirus
EGFKTLIK

SEQ ID NO: 37271 - protein, 10 aa, Artificial Sequence
  Peptide Derived from Human Papillomavirus
EGFKTLIKPA

SEQ ID NO: 37272 - protein, 11 aa, Artificial Sequence
  Peptide Derived from Human Papillomavirus
EGGDWRPIVQF

SEQ ID NO: 37273 - protein, 8 aa, Artificial Sequence
  Peptide Derived from Human Papillomavirus
EGIPFGTF

SEQ ID NO: 37274 - protein, 9 aa, Artificial Sequence
  Peptide Derived from Human Papillomavirus
EGIPFGTFK

SEQ ID NO: 37275 - protein, 9 aa, Artificial Sequence
  Peptide Derived from Human Papillomavirus
EGTGCNGWF

SEQ ID NO: 37276 - protein, 10 aa, Artificial Sequence
  Peptide Derived from Human Papillomavirus
EGTGCNGWFF

SEQ ID NO: 37277 - protein, 8 aa, Artificial Sequence
  Peptide Derived from Human Papillomavirus
EINDKNWK

SEQ ID NO: 37278 - protein, 10 aa, Artificial Sequence
  Peptide Derived from Human Papillomavirus
EINDKNWKCF

SEQ ID NO: 37279 - protein, 11 aa, Artificial Sequence
  Peptide Derived from Human Papillomavirus
EINDKNWKCFF

SEQ ID NO: 37280 - protein, 8 aa, Artificial Sequence
  Peptide Derived from Human Papillomavirus
EISLNSGH

SEQ ID NO: 37281 - protein, 9 aa, Artificial Sequence
  Peptide Derived from Human Papillomavirus
EISLNSGHK

SEQ ID NO: 37282 - protein, 10 aa, Artificial Sequence
  Peptide Derived from Human Papillomavirus
EISLNSGHKK

SEQ ID NO: 37283 - protein, 11 aa, Artificial Sequence
  Peptide Derived from Human Papillomavirus
EISLNSGHKKA

SEQ ID NO: 37284 - protein, 8 aa, Artificial Sequence
  Peptide Derived from Human Papillomavirus
ELKELLQA

SEQ ID NO: 37285 - protein, 11 aa, Artificial Sequence
  Peptide Derived from Human Papillomavirus
ELKELLQASNK

SEQ ID NO: 37286 - protein, 8 aa, Artificial Sequence
  Peptide Derived from Human Papillomavirus
ELLQASNK

SEQ ID NO: 37287 - protein, 9 aa, Artificial Sequence
  Peptide Derived from Human Papillomavirus
ELLQASNKK

SEQ ID NO: 37288 - protein, 10 aa, Artificial Sequence
  Peptide Derived from Human Papillomavirus
ELLQASNKKA

SEQ ID NO: 37289 - protein, 11 aa, Artificial Sequence
  Peptide Derived from Human Papillomavirus
ELLQASNKKAA

SEQ ID NO: 37290 - protein, 8 aa, Artificial Sequence
  Peptide Derived from Human Papillomavirus
ESDMAFQY

SEQ ID NO: 37291 - protein, 9 aa, Artificial Sequence
  Peptide Derived from Human Papillomavirus
ESDMAFQYA

SEQ ID NO: 37292 - protein, 9 aa, Artificial Sequence
  Peptide Derived from Human Papillomavirus
ESRVTVFTF

SEQ ID NO: 37293 - protein, 11 aa, Artificial Sequence
  Peptide Derived from Human Papillomavirus
ESRVTVFTFPH

SEQ ID NO: 37294 - protein, 8 aa, Artificial Sequence
  Peptide Derived from Human Papillomavirus
ETAQALFH

SEQ ID NO: 37295 - protein, 9 aa, Artificial Sequence
  Peptide Derived from Human Papillomavirus
ETAQALFHA

SEQ ID NO: 37296 - protein, 10 aa, Artificial Sequence
  Peptide Derived from Human Papillomavirus
ETCMLIEPPK

SEQ ID NO: 37297 - protein, 10 aa, Artificial Sequence
  Peptide Derived from Human Papillomavirus
ETQVTVNTNA

SEQ ID NO: 37298 - protein, 10 aa, Artificial Sequence
  Peptide Derived from Human Papillomavirus
EVQNDAQVLH

SEQ ID NO: 37299 - protein, 9 aa, Artificial Sequence
  Peptide Derived from Human Papillomavirus
FDKNGNPVY

SEQ ID NO: 37300 - protein, 10 aa, Artificial Sequence
  Peptide Derived from Human Papillomavirus
FDLSDMVQWA

SEQ ID NO: 37301 - protein, 11 aa, Artificial Sequence
  Peptide Derived from Human Papillomavirus
FDLSDMVQWAF

SEQ ID NO: 37302 - protein, 8 aa, Artificial Sequence
  Peptide Derived from Human Papillomavirus
FDNYMRNA

SEQ ID NO: 37303 - protein, 8 aa, Artificial Sequence
  Peptide Derived from Human Papillomavirus
FFERTWSR

SEQ ID NO: 37304 - protein, 9 aa, Artificial Sequence
  Peptide Derived from Human Papillomavirus
FFVETIVEK

SEQ ID NO: 37305 - protein, 10 aa, Artificial Sequence
  Peptide Derived from Human Papillomavirus
FFVETIVEKK

SEQ ID NO: 37306 - protein, 8 aa, Artificial Sequence
  Peptide Derived from Human Papillomavirus
FGMSFIHF

SEQ ID NO: 37307 - protein, 8 aa, Artificial Sequence
  Peptide Derived from Human Papillomavirus
FGVNPTVA

SEQ ID NO: 37308 - protein, 11 aa, Artificial Sequence
  Peptide Derived from Human Papillomavirus
FGVNPTVAEGF

SEQ ID NO: 37309 - protein, 8 aa, Artificial Sequence
  Peptide Derived from Human Papillomavirus
FIHFLQGA

SEQ ID NO: 37310 - protein, 9 aa, Artificial Sequence
  Peptide Derived from Human Papillomavirus
FISFLRALK

SEQ ID NO: 37311 - protein, 11 aa, Artificial Sequence
  Peptide Derived from Human Papillomavirus
FISFLRALKEF

SEQ ID NO: 37312 - protein, 8 aa, Artificial Sequence
  Peptide Derived from Human Papillomavirus
FLKGTPKK

SEQ ID NO: 37313 - protein, 8 aa, Artificial Sequence
  Peptide Derived from Human Papillomavirus
FLKSNCQA

SEQ ID NO: 37314 - protein, 9 aa, Artificial Sequence
  Peptide Derived from Human Papillomavirus
FLKSNCQAK

SEQ ID NO: 37315 - protein, 10 aa, Artificial Sequence
  Peptide Derived from Human Papillomavirus
FLKSNCQAKY

SEQ ID NO: 37316 - protein, 9 aa, Artificial Sequence
  Peptide Derived from Human Papillomavirus
FLQGAIISF

SEQ ID NO: 37317 - protein, 8 aa, Artificial Sequence
  Peptide Derived from Human Papillomavirus
FLRALKEF

SEQ ID NO: 37318 - protein, 10 aa, Artificial Sequence
  Peptide Derived from Human Papillomavirus
FLRALKEFLK

SEQ ID NO: 37319 - protein, 9 aa, Artificial Sequence
  Peptide Derived from Human Papillomavirus
FLRYQGVEF

SEQ ID NO: 37320 - protein, 8 aa, Artificial Sequence
  Peptide Derived from Human Papillomavirus
FTDLVRNF

SEQ ID NO: 37321 - protein, 9 aa, Artificial Sequence
  Peptide Derived from Human Papillomavirus
FTDLVRNFK

SEQ ID NO: 37322 - protein, 9 aa, Artificial Sequence
  Peptide Derived from Human Papillomavirus
FTFPHAFPF

SEQ ID NO: 37323 - protein, 11 aa, Artificial Sequence
  Peptide Derived from Human Papillomavirus
FTFPHAFPFDK

SEQ ID NO: 37324 - protein, 8 aa, Artificial Sequence
  Peptide Derived from Human Papillomavirus
FTISDSGY

SEQ ID NO: 37325 - protein, 8 aa, Artificial Sequence
  Peptide Derived from Human Papillomavirus
FVETIVEK

SEQ ID NO: 37326 - protein, 9 aa, Artificial Sequence
  Peptide Derived from Human Papillomavirus
FVETIVEKK

SEQ ID NO: 37327 - protein, 8 aa, Artificial Sequence
  Peptide Derived from Human Papillomavirus
FVNSNSHF

SEQ ID NO: 37328 - protein, 8 aa, Artificial Sequence
  Peptide Derived from Human Papillomavirus
GCSEVEAA

SEQ ID NO: 37329 - protein, 9 aa, Artificial Sequence
  Peptide Derived from Human Papillomavirus
GDTPEWIQR

SEQ ID NO: 37330 - protein, 9 aa, Artificial Sequence
  Peptide Derived from Human Papillomavirus
GDWRPIVQF

SEQ ID NO: 37331 - protein, 11 aa, Artificial Sequence
  Peptide Derived from Human Papillomavirus
GDWRPIVQFLR

SEQ ID NO: 37332 - protein, 9 aa, Artificial Sequence
  Peptide Derived from Human Papillomavirus
GFKTLIKPA

SEQ ID NO: 37333 - protein, 8 aa, Artificial Sequence
  Peptide Derived from Human Papillomavirus
GGDSSDNA

SEQ ID NO: 37334 - protein, 10 aa, Artificial Sequence
  Peptide Derived from Human Papillomavirus
GGDWRPIVQF

SEQ ID NO: 37335 - protein, 8 aa, Artificial Sequence
  Peptide Derived from Human Papillomavirus
GIPFGTFK

SEQ ID NO: 37336 - protein, 9 aa, Artificial Sequence
  Peptide Derived from Human Papillomavirus
GLSFTDLVR

SEQ ID NO: 37337 - protein, 11 aa, Artificial Sequence
  Peptide Derived from Human Papillomavirus
GLSFTDLVRNF

SEQ ID NO: 37338 - protein, 11 aa, Artificial Sequence
  Peptide Derived from Human Papillomavirus
GMSFIHFLQGA

SEQ ID NO: 37339 - protein, 8 aa, Artificial Sequence
  Peptide Derived from Human Papillomavirus
GTGCNGWF

SEQ ID NO: 37340 - protein, 9 aa, Artificial Sequence
  Peptide Derived from Human Papillomavirus
GTGCNGWFF

SEQ ID NO: 37341 - protein, 11 aa, Artificial Sequence
  Peptide Derived from Human Papillomavirus
GTPKKNCILLY

SEQ ID NO: 37342 - protein, 9 aa, Artificial Sequence
  Peptide Derived from Human Papillomavirus
GVEFISFLR

SEQ ID NO: 37343 - protein, 10 aa, Artificial Sequence
  Peptide Derived from Human Papillomavirus
GVEFISFLRA

SEQ ID NO: 37344 - protein, 9 aa, Artificial Sequence
  Peptide Derived from Human Papillomavirus
GVLILALLR

SEQ ID NO: 37345 - protein, 10 aa, Artificial Sequence
  Peptide Derived from Human Papillomavirus
GVLILALLRY

SEQ ID NO: 37346 - protein, 11 aa, Artificial Sequence
  Peptide Derived from Human Papillomavirus
GVLILALLRYK

SEQ ID NO: 37347 - protein, 10 aa, Artificial Sequence
  Peptide Derived from Human Papillomavirus
GVNPTVAEGF

SEQ ID NO: 37348 - protein, 11 aa, Artificial Sequence
  Peptide Derived from Human Papillomavirus
GVNPTVAEGFK

SEQ ID NO: 37349 - protein, 9 aa, Artificial Sequence
  Peptide Derived from Human Papillomavirus
HAQEVQNDA

SEQ ID NO: 37350 - protein, 8 aa, Artificial Sequence
  Peptide Derived from Human Papillomavirus
HCSITELK

SEQ ID NO: 37351 - protein, 10 aa, Artificial Sequence
  Peptide Derived from Human Papillomavirus
HFLQGAIISF

SEQ ID NO: 37352 - protein, 8 aa, Artificial Sequence
  Peptide Derived from Human Papillomavirus
HFWLEPLA

SEQ ID NO: 37353 - protein, 11 aa, Artificial Sequence
  Peptide Derived from Human Papillomavirus
HFWLEPLADTK

SEQ ID NO: 37354 - protein, 8 aa, Artificial Sequence
  Peptide Derived from Human Papillomavirus
HGIDDSNF

SEQ ID NO: 37355 - protein, 8 aa, Artificial Sequence
  Peptide Derived from Human Papillomavirus
HIQCLDCK

SEQ ID NO: 37356 - protein, 8 aa, Artificial Sequence
  Peptide Derived from Human Papillomavirus
HLLKRKFA

SEQ ID NO: 37357 - protein, 10 aa, Artificial Sequence
  Peptide Derived from Human Papillomavirus
HTCWTYFDNY

SEQ ID NO: 37358 - protein, 10 aa, Artificial Sequence
  Peptide Derived from Human Papillomavirus
ICEQAEQETA

SEQ ID NO: 37359 - protein, 8 aa, Artificial Sequence
  Peptide Derived from Human Papillomavirus
IDEGGDWR

SEQ ID NO: 37360 - protein, 8 aa, Artificial Sequence
  Peptide Derived from Human Papillomavirus
IDPAKDNK

SEQ ID NO: 37361 - protein, 11 aa, Artificial Sequence
  Peptide Derived from Human Papillomavirus
IDPAKDNKWPY

SEQ ID NO: 37362 - protein, 11 aa, Artificial Sequence
  Peptide Derived from Human Papillomavirus
IDTQLSICEQA

SEQ ID NO: 37363 - protein, 9 aa, Artificial Sequence
  Peptide Derived from Human Papillomavirus
IFGVNPTVA

SEQ ID NO: 37364 - protein, 11 aa, Artificial Sequence
  Peptide Derived from Human Papillomavirus
IIQHGIDDSNF

SEQ ID NO: 37365 - protein, 10 aa, Artificial Sequence
  Peptide Derived from Human Papillomavirus
IISFVNSNSH

SEQ ID NO: 37366 - protein, 11 aa, Artificial Sequence
  Peptide Derived from Human Papillomavirus
IISFVNSNSHF

SEQ ID NO: 37367 - protein, 8 aa, Artificial Sequence
  Peptide Derived from Human Papillomavirus
ILALLRYK

SEQ ID NO: 37368 - protein, 11 aa, Artificial Sequence
  Peptide Derived from Human Papillomavirus
ILALLRYKCGK

SEQ ID NO: 37369 - protein, 10 aa, Artificial Sequence
  Peptide Derived from Human Papillomavirus
ILLTSNIDPA

SEQ ID NO: 37370 - protein, 11 aa, Artificial Sequence
  Peptide Derived from Human Papillomavirus
ILLTSNIDPAK

SEQ ID NO: 37371 - protein, 11 aa, Artificial Sequence
  Peptide Derived from Human Papillomavirus
ILLYGPANTGK

SEQ ID NO: 37372 - protein, 9 aa, Artificial Sequence
  Peptide Derived from Human Papillomavirus
ISDDEDETA

SEQ ID NO: 37373 - protein, 8 aa, Artificial Sequence
  Peptide Derived from Human Papillomavirus
ISFLRALK

SEQ ID NO: 37374 - protein, 10 aa, Artificial Sequence
  Peptide Derived from Human Papillomavirus
ISFLRALKEF

SEQ ID NO: 37375 - protein, 9 aa, Artificial Sequence
  Peptide Derived from Human Papillomavirus
ISFVNSNSH

SEQ ID NO: 37376 - protein, 10 aa, Artificial Sequence
  Peptide Derived from Human Papillomavirus
ISFVNSNSHF

SEQ ID NO: 37377 - protein, 8 aa, Artificial Sequence
  Peptide Derived from Human Papillomavirus
ISIDRKHK

SEQ ID NO: 37378 - protein, 8 aa, Artificial Sequence
  Peptide Derived from Human Papillomavirus
ISLNSGHK

SEQ ID NO: 37379 - protein, 9 aa, Artificial Sequence
  Peptide Derived from Human Papillomavirus
ISLNSGHKK

SEQ ID NO: 37380 - protein, 10 aa, Artificial Sequence
  Peptide Derived from Human Papillomavirus
ISLNSGHKKA

SEQ ID NO: 37381 - protein, 11 aa, Artificial Sequence
  Peptide Derived from Human Papillomavirus
ISLNSGHKKAK

SEQ ID NO: 37382 - protein, 10 aa, Artificial Sequence
  Peptide Derived from Human Papillomavirus
ITELKELLQA

SEQ ID NO: 37383 - protein, 8 aa, Artificial Sequence
  Peptide Derived from Human Papillomavirus
KAAMLAVF

SEQ ID NO: 37384 - protein, 9 aa, Artificial Sequence
  Peptide Derived from Human Papillomavirus
KAAMLAVFK

SEQ ID NO: 37385 - protein, 10 aa, Artificial Sequence
  Peptide Derived from Human Papillomavirus
KCFFERTWSR

SEQ ID NO: 37386 - protein, 10 aa, Artificial Sequence
  Peptide Derived from Human Papillomavirus
KCGKNRLTVA

SEQ ID NO: 37387 - protein, 11 aa, Artificial Sequence
  Peptide Derived from Human Papillomavirus
KCGKNRLTVAK

SEQ ID NO: 37388 - protein, 9 aa, Artificial Sequence
  Peptide Derived from Human Papillomavirus
KCVTGQNTR

SEQ ID NO: 37389 - protein, 8 aa, Artificial Sequence
  Peptide Derived from Human Papillomavirus
KDCAVMCR

SEQ ID NO: 37390 - protein, 9 aa, Artificial Sequence
  Peptide Derived from Human Papillomavirus
KDCAVMCRH

SEQ ID NO: 37391 - protein, 10 aa, Artificial Sequence
  Peptide Derived from Human Papillomavirus
KDCAVMCRHY

SEQ ID NO: 37392 - protein, 11 aa, Artificial Sequence
  Peptide Derived from Human Papillomavirus
KDCAVMCRHYK

SEQ ID NO: 37393 - protein, 8 aa, Artificial Sequence
  Peptide Derived from Human Papillomavirus
KDIYGLSF

SEQ ID NO: 37394 - protein, 11 aa, Artificial Sequence
  Peptide Derived from Human Papillomavirus
KDNKWPYLESR

SEQ ID NO: 37395 - protein, 8 aa, Artificial Sequence
  Peptide Derived from Human Papillomavirus
KGLSTLLH

SEQ ID NO: 37396 - protein, 9 aa, Artificial Sequence
  Peptide Derived from Human Papillomavirus
KIDEGGDWR

SEQ ID NO: 37397 - protein, 8 aa, Artificial Sequence
  Peptide Derived from Human Papillomavirus
KLRSSVAA

SEQ ID NO: 37398 - protein, 10 aa, Artificial Sequence
  Peptide Derived from Human Papillomavirus
KLRSSVAALY

SEQ ID NO: 37399 - protein, 8 aa, Artificial Sequence
  Peptide Derived from Human Papillomavirus
KSNCQAKY

SEQ ID NO: 37400 - protein, 10 aa, Artificial Sequence
  Peptide Derived from Human Papillomavirus
KSNCQAKYLK

SEQ ID NO: 37401 - protein, 8 aa, Artificial Sequence
  Peptide Derived from Human Papillomavirus
KSYFGMSF

SEQ ID NO: 37402 - protein, 10 aa, Artificial Sequence
  Peptide Derived from Human Papillomavirus
KSYFGMSFIH

SEQ ID NO: 37403 - protein, 11 aa, Artificial Sequence
  Peptide Derived from Human Papillomavirus
KSYFGMSFIHF

SEQ ID NO: 37404 - protein, 10 aa, Artificial Sequence
  Peptide Derived from Human Papillomavirus
KTLIKPATLY

SEQ ID NO: 37405 - protein, 11 aa, Artificial Sequence
  Peptide Derived from Human Papillomavirus
KTLIKPATLYA

SEQ ID NO: 37406 - protein, 10 aa, Artificial Sequence
  Peptide Derived from Human Papillomavirus
KTTCTDWVMA

SEQ ID NO: 37407 - protein, 8 aa, Artificial Sequence
  Peptide Derived from Human Papillomavirus
KVAMLDDA

SEQ ID NO: 37408 - protein, 10 aa, Artificial Sequence
  Peptide Derived from Human Papillomavirus
KVAMLDDATH

SEQ ID NO: 37409 - protein, 8 aa, Artificial Sequence
  Peptide Derived from Human Papillomavirus
LADCNSNA

SEQ ID NO: 37410 - protein, 9 aa, Artificial Sequence
  Peptide Derived from Human Papillomavirus
LADCNSNAA

SEQ ID NO: 37411 - protein, 10 aa, Artificial Sequence
  Peptide Derived from Human Papillomavirus
LADCNSNAAA

SEQ ID NO: 37412 - protein, 11 aa, Artificial Sequence
  Peptide Derived from Human Papillomavirus
LADCNSNAAAF

SEQ ID NO: 37413 - protein, 10 aa, Artificial Sequence
  Peptide Derived from Human Papillomavirus
LALLRYKCGK

SEQ ID NO: 37414 - protein, 8 aa, Artificial Sequence
  Peptide Derived from Human Papillomavirus
LAVFKDIY

SEQ ID NO: 37415 - protein, 11 aa, Artificial Sequence
  Peptide Derived from Human Papillomavirus
LDCKWGVLILA

SEQ ID NO: 37416 - protein, 11 aa, Artificial Sequence
  Peptide Derived from Human Papillomavirus
LDDATHTCWTY

SEQ ID NO: 37417 - protein, 10 aa, Artificial Sequence
  Peptide Derived from Human Papillomavirus
LDGNPISIDR

SEQ ID NO: 37418 - protein, 11 aa, Artificial Sequence
  Peptide Derived from Human Papillomavirus
LDGNPISIDRK

SEQ ID NO: 37419 - protein, 10 aa, Artificial Sequence
  Peptide Derived from Human Papillomavirus
LDLHEDDEDA

SEQ ID NO: 37420 - protein, 11 aa, Artificial Sequence
  Peptide Derived from Human Papillomavirus
LFHAQEVQNDA

SEQ ID NO: 37421 - protein, 9 aa, Artificial Sequence
  Peptide Derived from Human Papillomavirus
LFTISDSGY

SEQ ID NO: 37422 - protein, 8 aa, Artificial Sequence
  Peptide Derived from Human Papillomavirus
LIEPPKLR

SEQ ID NO: 37423 - protein, 8 aa, Artificial Sequence
  Peptide Derived from Human Papillomavirus
LIKPATLY

SEQ ID NO: 37424 - protein, 9 aa, Artificial Sequence
  Peptide Derived from Human Papillomavirus
LIKPATLYA

SEQ ID NO: 37425 - protein, 10 aa, Artificial Sequence
  Peptide Derived from Human Papillomavirus
LIKPATLYAH

SEQ ID NO: 37426 - protein, 8 aa, Artificial Sequence
  Peptide Derived from Human Papillomavirus
LILALLRY

SEQ ID NO: 37427 - protein, 9 aa, Artificial Sequence
  Peptide Derived from Human Papillomavirus
LILALLRYK

SEQ ID NO: 37428 - protein, 11 aa, Artificial Sequence
  Peptide Derived from Human Papillomavirus
LLKRKFAGGSK

SEQ ID NO: 37429 - protein, 8 aa, Artificial Sequence
  Peptide Derived from Human Papillomavirus
LLQASNKK

SEQ ID NO: 37430 - protein, 9 aa, Artificial Sequence
  Peptide Derived from Human Papillomavirus
LLQASNKKA

SEQ ID NO: 37431 - protein, 10 aa, Artificial Sequence
  Peptide Derived from Human Papillomavirus
LLQASNKKAA

SEQ ID NO: 37432 - protein, 8 aa, Artificial Sequence
  Peptide Derived from Human Papillomavirus
LLRYKCGK

SEQ ID NO: 37433 - protein, 10 aa, Artificial Sequence
  Peptide Derived from Human Papillomavirus
LLRYKCGKNR

SEQ ID NO: 37434 - protein, 9 aa, Artificial Sequence
  Peptide Derived from Human Papillomavirus
LLTSNIDPA

SEQ ID NO: 37435 - protein, 10 aa, Artificial Sequence
  Peptide Derived from Human Papillomavirus
LLTSNIDPAK

SEQ ID NO: 37436 - protein, 10 aa, Artificial Sequence
  Peptide Derived from Human Papillomavirus
LLYGPANTGK

SEQ ID NO: 37437 - protein, 8 aa, Artificial Sequence
  Peptide Derived from Human Papillomavirus
LSDMVQWA

SEQ ID NO: 37438 - protein, 9 aa, Artificial Sequence
  Peptide Derived from Human Papillomavirus
LSDMVQWAF

SEQ ID NO: 37439 - protein, 8 aa, Artificial Sequence
  Peptide Derived from Human Papillomavirus
LSFTDLVR

SEQ ID NO: 37440 - protein, 10 aa, Artificial Sequence
  Peptide Derived from Human Papillomavirus
LSFTDLVRNF

SEQ ID NO: 37441 - protein, 11 aa, Artificial Sequence
  Peptide Derived from Human Papillomavirus
LSFTDLVRNFK

SEQ ID NO: 37442 - protein, 10 aa, Artificial Sequence
  Peptide Derived from Human Papillomavirus
LSVDTDLSPR

SEQ ID NO: 37443 - protein, 8 aa, Artificial Sequence
  Peptide Derived from Human Papillomavirus
LTDESDMA

SEQ ID NO: 37444 - protein, 9 aa, Artificial Sequence
  Peptide Derived from Human Papillomavirus
LTDESDMAF

SEQ ID NO: 37445 - protein, 11 aa, Artificial Sequence
  Peptide Derived from Human Papillomavirus
LTDESDMAFQY

SEQ ID NO: 37446 - protein, 8 aa, Artificial Sequence
  Peptide Derived from Human Papillomavirus
LTSNIDPA

SEQ ID NO: 37447 - protein, 9 aa, Artificial Sequence
  Peptide Derived from Human Papillomavirus
LTSNIDPAK

SEQ ID NO: 37448 - protein, 9 aa, Artificial Sequence
  Peptide Derived from Human Papillomavirus
LVRNFKSDK

SEQ ID NO: 37449 - protein, 9 aa, Artificial Sequence
  Peptide Derived from Human Papillomavirus
MAFQYAQLA

SEQ ID NO: 37450 - protein, 11 aa, Artificial Sequence
  Peptide Derived from Human Papillomavirus
MAIFGVNPTVA

SEQ ID NO: 37451 - protein, 8 aa, Artificial Sequence
  Peptide Derived from Human Papillomavirus
MCRHYKRA

SEQ ID NO: 37452 - protein, 10 aa, Artificial Sequence
  Peptide Derived from Human Papillomavirus
MCRHYKRAQK

SEQ ID NO: 37453 - protein, 11 aa, Artificial Sequence
  Peptide Derived from Human Papillomavirus
MCRHYKRAQKR

SEQ ID NO: 37454 - protein, 9 aa, Artificial Sequence
  Peptide Derived from Human Papillomavirus
MLAVFKDIY

SEQ ID NO: 37455 - protein, 9 aa, Artificial Sequence
  Peptide Derived from Human Papillomavirus
MLIEPPKLR

SEQ ID NO: 37456 - protein, 10 aa, Artificial Sequence
  Peptide Derived from Human Papillomavirus
MSFIHFLQGA

SEQ ID NO: 37457 - protein, 8 aa, Artificial Sequence
  Peptide Derived from Human Papillomavirus
MSQWIKYR

SEQ ID NO: 37458 - protein, 11 aa, Artificial Sequence
  Peptide Derived from Human Papillomavirus
MSQWIKYRCSK

SEQ ID NO: 37459 - protein, 9 aa, Artificial Sequence
  Peptide Derived from Human Papillomavirus
NAENGGSVH

SEQ ID NO: 37460 - protein, 8 aa, Artificial Sequence
  Peptide Derived from Human Papillomavirus
NAENVDPH

SEQ ID NO: 37461 - protein, 9 aa, Artificial Sequence
  Peptide Derived from Human Papillomavirus
NCILLYGPA

SEQ ID NO: 37462 - protein, 8 aa, Artificial Sequence
  Peptide Derived from Human Papillomavirus
NCQAKYLK

SEQ ID NO: 37463 - protein, 11 aa, Artificial Sequence
  Peptide Derived from Human Papillomavirus
NCQAKYLKDCA

SEQ ID NO: 37464 - protein, 10 aa, Artificial Sequence
  Peptide Derived from Human Papillomavirus
NDAQVLHLLK

SEQ ID NO: 37465 - protein, 11 aa, Artificial Sequence
  Peptide Derived from Human Papillomavirus
NDAQVLHLLKR

SEQ ID NO: 37466 - protein, 8 aa, Artificial Sequence
  Peptide Derived from Human Papillomavirus
NDKNWKCF

SEQ ID NO: 37467 - protein, 9 aa, Artificial Sequence
  Peptide Derived from Human Papillomavirus
NDKNWKCFF

SEQ ID NO: 37468 - protein, 11 aa, Artificial Sequence
  Peptide Derived from Human Papillomavirus
NDKNWKCFFER

SEQ ID NO: 37469 - protein, 10 aa, Artificial Sequence
  Peptide Derived from Human Papillomavirus
NDLTDESDMA

SEQ ID NO: 37470 - protein, 11 aa, Artificial Sequence
  Peptide Derived from Human Papillomavirus
NDLTDESDMAF

SEQ ID NO: 37471 - protein, 11 aa, Artificial Sequence
  Peptide Derived from Human Papillomavirus
NFDLSDMVQWA

SEQ ID NO: 37472 - protein, 11 aa, Artificial Sequence
  Peptide Derived from Human Papillomavirus
NGNPVYEINDK

SEQ ID NO: 37473 - protein, 9 aa, Artificial Sequence
  Peptide Derived from Human Papillomavirus
NIDPAKDNK

SEQ ID NO: 37474 - protein, 8 aa, Artificial Sequence
  Peptide Derived from Human Papillomavirus
NMSQWIKY

SEQ ID NO: 37475 - protein, 9 aa, Artificial Sequence
  Peptide Derived from Human Papillomavirus
NMSQWIKYR

SEQ ID NO: 37476 - protein, 8 aa, Artificial Sequence
  Peptide Derived from Human Papillomavirus
NSGHKKAK

SEQ ID NO: 37477 - protein, 9 aa, Artificial Sequence
  Peptide Derived from Human Papillomavirus
NSGHKKAKR

SEQ ID NO: 37478 - protein, 10 aa, Artificial Sequence
  Peptide Derived from Human Papillomavirus
NSGHKKAKRR

SEQ ID NO: 37479 - protein, 10 aa, Artificial Sequence
  Peptide Derived from Human Papillomavirus
NSHFWLEPLA

SEQ ID NO: 37480 - protein, 9 aa, Artificial Sequence
  Peptide Derived from Human Papillomavirus
NSNAAAFLK

SEQ ID NO: 37481 - protein, 11 aa, Artificial Sequence
  Peptide Derived from Human Papillomavirus
NTGKSYFGMSF

SEQ ID NO: 37482 - protein, 11 aa, Artificial Sequence
  Peptide Derived from Human Papillomavirus
NTNAENGGSVH

SEQ ID NO: 37483 - protein, 9 aa, Artificial Sequence
  Peptide Derived from Human Papillomavirus
PAKDNKWPY

SEQ ID NO: 37484 - protein, 8 aa, Artificial Sequence
  Peptide Derived from Human Papillomavirus
PANTGKSY

SEQ ID NO: 37485 - protein, 9 aa, Artificial Sequence
  Peptide Derived from Human Papillomavirus
PANTGKSYF

SEQ ID NO: 37486 - protein, 10 aa, Artificial Sequence
  Peptide Derived from Human Papillomavirus
PFDKNGNPVY

SEQ ID NO: 37487 - protein, 11 aa, Artificial Sequence
  Peptide Derived from Human Papillomavirus
PILLTSNIDPA

SEQ ID NO: 37488 - protein, 8 aa, Artificial Sequence
  Peptide Derived from Human Papillomavirus
PISIDRKH

SEQ ID NO: 37489 - protein, 9 aa, Artificial Sequence
  Peptide Derived from Human Papillomavirus
PISIDRKHK

SEQ ID NO: 37490 - protein, 8 aa, Artificial Sequence
  Peptide Derived from Human Papillomavirus
PIVQFLRY

SEQ ID NO: 37491 - protein, 8 aa, Artificial Sequence
  Peptide Derived from Human Papillomavirus
PLADTKVA

SEQ ID NO: 37492 - protein, 8 aa, Artificial Sequence
  Peptide Derived from Human Papillomavirus
PTVAEGFK

SEQ ID NO: 37493 - protein, 8 aa, Artificial Sequence
  Peptide Derived from Human Papillomavirus
PVYEINDK

SEQ ID NO: 37494 - protein, 11 aa, Artificial Sequence
  Peptide Derived from Human Papillomavirus
PVYEINDKNWK

SEQ ID NO: 37495 - protein, 9 aa, Artificial Sequence
  Peptide Derived from Human Papillomavirus
QAEQETAQA

SEQ ID NO: 37496 - protein, 11 aa, Artificial Sequence
  Peptide Derived from Human Papillomavirus
QAEQETAQALF

SEQ ID NO: 37497 - protein, 9 aa, Artificial Sequence
  Peptide Derived from Human Papillomavirus
QAKYLKDCA

SEQ ID NO: 37498 - protein, 8 aa, Artificial Sequence
  Peptide Derived from Human Papillomavirus
QASNKKAA

SEQ ID NO: 37499 - protein, 11 aa, Artificial Sequence
  Peptide Derived from Human Papillomavirus
QASNKKAAMLA

SEQ ID NO: 37500 - protein, 10 aa, Artificial Sequence
  Peptide Derived from Human Papillomavirus
QFLRYQGVEF

SEQ ID NO: 37501 - protein, 8 aa, Artificial Sequence
  Peptide Derived from Human Papillomavirus
QGVEFISF

SEQ ID NO: 37502 - protein, 10 aa, Artificial Sequence
  Peptide Derived from Human Papillomavirus
QGVEFISFLR

SEQ ID NO: 37503 - protein, 11 aa, Artificial Sequence
  Peptide Derived from Human Papillomavirus
QGVEFISFLRA

SEQ ID NO: 37504 - protein, 9 aa, Artificial Sequence
  Peptide Derived from Human Papillomavirus
QLADCNSNA

SEQ ID NO: 37505 - protein, 10 aa, Artificial Sequence
  Peptide Derived from Human Papillomavirus
QLADCNSNAA

SEQ ID NO: 37506 - protein, 11 aa, Artificial Sequence
  Peptide Derived from Human Papillomavirus
QLADCNSNAAA

SEQ ID NO: 37507 - protein, 8 aa, Artificial Sequence
  Peptide Derived from Human Papillomavirus
QLSICEQA

SEQ ID NO: 37508 - protein, 11 aa, Artificial Sequence
  Peptide Derived from Human Papillomavirus
QLSVDTDLSPR

SEQ ID NO: 37509 - protein, 9 aa, Artificial Sequence
  Peptide Derived from Human Papillomavirus
QMNMSQWIK

SEQ ID NO: 37510 - protein, 10 aa, Artificial Sequence
  Peptide Derived from Human Papillomavirus
QMNMSQWIKY

SEQ ID NO: 37511 - protein, 11 aa, Artificial Sequence
  Peptide Derived from Human Papillomavirus
QMNMSQWIKYR

SEQ ID NO: 37512 - protein, 11 aa, Artificial Sequence
  Peptide Derived from Human Papillomavirus
QSSGGDSSDNA

SEQ ID NO: 37513 - protein, 8 aa, Artificial Sequence
  Peptide Derived from Human Papillomavirus
QVLHLLKR

SEQ ID NO: 37514 - protein, 9 aa, Artificial Sequence
  Peptide Derived from Human Papillomavirus
QVLHLLKRK

SEQ ID NO: 37515 - protein, 10 aa, Artificial Sequence
  Peptide Derived from Human Papillomavirus
QVLHLLKRKF

SEQ ID NO: 37516 - protein, 11 aa, Artificial Sequence
  Peptide Derived from Human Papillomavirus
QVLHLLKRKFA

SEQ ID NO: 37517 - protein, 8 aa, Artificial Sequence
  Peptide Derived from Human Papillomavirus
QVTVNTNA

SEQ ID NO: 37518 - protein, 8 aa, Artificial Sequence
  Peptide Derived from Human Papillomavirus
RALKEFLK

SEQ ID NO: 37519 - protein, 11 aa, Artificial Sequence
  Peptide Derived from Human Papillomavirus
RLDLHEDDEDA

SEQ ID NO: 37520 - protein, 10 aa, Artificial Sequence
  Peptide Derived from Human Papillomavirus
RLFTISDSGY

SEQ ID NO: 37521 - protein, 11 aa, Artificial Sequence
  Peptide Derived from Human Papillomavirus
RLQEISLNSGH

SEQ ID NO: 37522 - protein, 8 aa, Artificial Sequence
  Peptide Derived from Human Papillomavirus
RSSVAALY

SEQ ID NO: 37523 - protein, 10 aa, Artificial Sequence
  Peptide Derived from Human Papillomavirus
RSSVAALYWY

SEQ ID NO: 37524 - protein, 11 aa, Artificial Sequence
  Peptide Derived from Human Papillomavirus
RSSVAALYWYR

SEQ ID NO: 37525 - protein, 9 aa, Artificial Sequence
  Peptide Derived from Human Papillomavirus
RTWSRLDLH

SEQ ID NO: 37526 - protein, 9 aa, Artificial Sequence
  Peptide Derived from Human Papillomavirus
RVTVFTFPH

SEQ ID NO: 37527 - protein, 10 aa, Artificial Sequence
  Peptide Derived from Human Papillomavirus
RVTVFTFPHA

SEQ ID NO: 37528 - protein, 11 aa, Artificial Sequence
  Peptide Derived from Human Papillomavirus
RVTVFTFPHAF

SEQ ID NO: 37529 - protein, 8 aa, Artificial Sequence
  Peptide Derived from Human Papillomavirus
SDDEDETA

SEQ ID NO: 37530 - protein, 8 aa, Artificial Sequence
  Peptide Derived from Human Papillomavirus
SDMAFQYA

SEQ ID NO: 37531 - protein, 11 aa, Artificial Sequence
  Peptide Derived from Human Papillomavirus
SDMAFQYAQLA

SEQ ID NO: 37532 - protein, 8 aa, Artificial Sequence
  Peptide Derived from Human Papillomavirus
SDMVQWAF

SEQ ID NO: 37533 - protein, 10 aa, Artificial Sequence
  Peptide Derived from Human Papillomavirus
SDNAENVDPH

SEQ ID NO: 37534 - protein, 9 aa, Artificial Sequence
  Peptide Derived from Human Papillomavirus
SFIHFLQGA

SEQ ID NO: 37535 - protein, 9 aa, Artificial Sequence
  Peptide Derived from Human Papillomavirus
SFLRALKEF

SEQ ID NO: 37536 - protein, 11 aa, Artificial Sequence
  Peptide Derived from Human Papillomavirus
SFLRALKEFLK

SEQ ID NO: 37537 - protein, 9 aa, Artificial Sequence
  Peptide Derived from Human Papillomavirus
SFTDLVRNF

SEQ ID NO: 37538 - protein, 10 aa, Artificial Sequence
  Peptide Derived from Human Papillomavirus
SFTDLVRNFK

SEQ ID NO: 37539 - protein, 8 aa, Artificial Sequence
  Peptide Derived from Human Papillomavirus
SFVNSNSH

SEQ ID NO: 37540 - protein, 9 aa, Artificial Sequence
  Peptide Derived from Human Papillomavirus
SFVNSNSHF

SEQ ID NO: 37541 - protein, 10 aa, Artificial Sequence
  Peptide Derived from Human Papillomavirus
SGDTPEWIQR

SEQ ID NO: 37542 - protein, 9 aa, Artificial Sequence
  Peptide Derived from Human Papillomavirus
SGGDSSDNA

SEQ ID NO: 37543 - protein, 8 aa, Artificial Sequence
  Peptide Derived from Human Papillomavirus
SGHKKAKR

SEQ ID NO: 37544 - protein, 9 aa, Artificial Sequence
  Peptide Derived from Human Papillomavirus
SGHKKAKRR

SEQ ID NO: 37545 - protein, 11 aa, Artificial Sequence
  Peptide Derived from Human Papillomavirus
SGHKKAKRRLF

SEQ ID NO: 37546 - protein, 10 aa, Artificial Sequence
  Peptide Derived from Human Papillomavirus
SGYGCSEVEA

SEQ ID NO: 37547 - protein, 11 aa, Artificial Sequence
  Peptide Derived from Human Papillomavirus
SGYGCSEVEAA

SEQ ID NO: 37548 - protein, 11 aa, Artificial Sequence
  Peptide Derived from Human Papillomavirus
SICEQAEQETA

SEQ ID NO: 37549 - protein, 11 aa, Artificial Sequence
  Peptide Derived from Human Papillomavirus
SITELKELLQA

SEQ ID NO: 37550 - protein, 8 aa, Artificial Sequence
  Peptide Derived from Human Papillomavirus
SLNSGHKK

SEQ ID NO: 37551 - protein, 9 aa, Artificial Sequence
  Peptide Derived from Human Papillomavirus
SLNSGHKKA

SEQ ID NO: 37552 - protein, 10 aa, Artificial Sequence
  Peptide Derived from Human Papillomavirus
SLNSGHKKAK

SEQ ID NO: 37553 - protein, 11 aa, Artificial Sequence
  Peptide Derived from Human Papillomavirus
SLNSGHKKAKR

SEQ ID NO: 37554 - protein, 11 aa, Artificial Sequence
  Peptide Derived from Human Papillomavirus
SSDNAENVDPH

SEQ ID NO: 37555 - protein, 10 aa, Artificial Sequence
  Peptide Derived from Human Papillomavirus
SSGGDSSDNA

SEQ ID NO: 37556 - protein, 9 aa, Artificial Sequence
  Peptide Derived from Human Papillomavirus
SSVAALYWY

SEQ ID NO: 37557 - protein, 10 aa, Artificial Sequence
  Peptide Derived from Human Papillomavirus
SSVAALYWYR

SEQ ID NO: 37558 - protein, 8 aa, Artificial Sequence
  Peptide Derived from Human Papillomavirus
SVAALYWY

SEQ ID NO: 37559 - protein, 9 aa, Artificial Sequence
  Peptide Derived from Human Papillomavirus
SVAALYWYR

SEQ ID NO: 37560 - protein, 9 aa, Artificial Sequence
  Peptide Derived from Human Papillomavirus
SVDTDLSPR

SEQ ID NO: 37561 - protein, 8 aa, Artificial Sequence
  Peptide Derived from Human Papillomavirus
TAQALFHA

SEQ ID NO: 37562 - protein, 9 aa, Artificial Sequence
  Peptide Derived from Human Papillomavirus
TCMLIEPPK

SEQ ID NO: 37563 - protein, 11 aa, Artificial Sequence
  Peptide Derived from Human Papillomavirus
TCMLIEPPKLR

SEQ ID NO: 37564 - protein, 8 aa, Artificial Sequence
  Peptide Derived from Human Papillomavirus
TCTDWVMA

SEQ ID NO: 37565 - protein, 10 aa, Artificial Sequence
  Peptide Derived from Human Papillomavirus
TCTDWVMAIF

SEQ ID NO: 37566 - protein, 9 aa, Artificial Sequence
  Peptide Derived from Human Papillomavirus
TCWTYFDNY

SEQ ID NO: 37567 - protein, 11 aa, Artificial Sequence
  Peptide Derived from Human Papillomavirus
TCWTYFDNYMR

SEQ ID NO: 37568 - protein, 8 aa, Artificial Sequence
  Peptide Derived from Human Papillomavirus
TDESDMAF

SEQ ID NO: 37569 - protein, 10 aa, Artificial Sequence
  Peptide Derived from Human Papillomavirus
TDESDMAFQY

SEQ ID NO: 37570 - protein, 11 aa, Artificial Sequence
  Peptide Derived from Human Papillomavirus
TDESDMAFQYA

SEQ ID NO: 37571 - protein, 8 aa, Artificial Sequence
  Peptide Derived from Human Papillomavirus
TDLVRNFK

SEQ ID NO: 37572 - protein, 11 aa, Artificial Sequence
  Peptide Derived from Human Papillomavirus
TDLVRNFKSDK

SEQ ID NO: 37573 - protein, 10 aa, Artificial Sequence
  Peptide Derived from Human Papillomavirus
TDTGSDMVDF

SEQ ID NO: 37574 - protein, 8 aa, Artificial Sequence
  Peptide Derived from Human Papillomavirus
TDWVMAIF

SEQ ID NO: 37575 - protein, 11 aa, Artificial Sequence
  Peptide Derived from Human Papillomavirus
TFKCVTGQNTR

SEQ ID NO: 37576 - protein, 8 aa, Artificial Sequence
  Peptide Derived from Human Papillomavirus
TFPHAFPF

SEQ ID NO: 37577 - protein, 10 aa, Artificial Sequence
  Peptide Derived from Human Papillomavirus
TFPHAFPFDK

SEQ ID NO: 37578 - protein, 8 aa, Artificial Sequence
  Peptide Derived from Human Papillomavirus
TGCNGWFF

SEQ ID NO: 37579 - protein, 10 aa, Artificial Sequence
  Peptide Derived from Human Papillomavirus
TGKSYFGMSF

SEQ ID NO: 37580 - protein, 8 aa, Artificial Sequence
  Peptide Derived from Human Papillomavirus
TGSDMVDF

SEQ ID NO: 37581 - protein, 9 aa, Artificial Sequence
  Peptide Derived from Human Papillomavirus
TLIKPATLY

SEQ ID NO: 37582 - protein, 10 aa, Artificial Sequence
  Peptide Derived from Human Papillomavirus
TLIKPATLYA

SEQ ID NO: 37583 - protein, 11 aa, Artificial Sequence
  Peptide Derived from Human Papillomavirus
TLIKPATLYAH

SEQ ID NO: 37584 - protein, 8 aa, Artificial Sequence
  Peptide Derived from Human Papillomavirus
TSNIDPAK

SEQ ID NO: 37585 - protein, 11 aa, Artificial Sequence
  Peptide Derived from Human Papillomavirus
TSNIDPAKDNK

SEQ ID NO: 37586 - protein, 9 aa, Artificial Sequence
  Peptide Derived from Human Papillomavirus
TTCTDWVMA

SEQ ID NO: 37587 - protein, 11 aa, Artificial Sequence
  Peptide Derived from Human Papillomavirus
TTCTDWVMAIF

SEQ ID NO: 37588 - protein, 11 aa, Artificial Sequence
  Peptide Derived from Human Papillomavirus
TVAEGFKTLIK

SEQ ID NO: 37589 - protein, 11 aa, Artificial Sequence
  Peptide Derived from Human Papillomavirus
TVAKGLSTLLH

SEQ ID NO: 37590 - protein, 8 aa, Artificial Sequence
  Peptide Derived from Human Papillomavirus
TVFTFPHA

SEQ ID NO: 37591 - protein, 9 aa, Artificial Sequence
  Peptide Derived from Human Papillomavirus
TVFTFPHAF

SEQ ID NO: 37592 - protein, 11 aa, Artificial Sequence
  Peptide Derived from Human Papillomavirus
TVFTFPHAFPF

SEQ ID NO: 37593 - protein, 8 aa, Artificial Sequence
  Peptide Derived from Human Papillomavirus
VAALYWYR

SEQ ID NO: 37594 - protein, 10 aa, Artificial Sequence
  Peptide Derived from Human Papillomavirus
VAEGFKTLIK

SEQ ID NO: 37595 - protein, 10 aa, Artificial Sequence
  Peptide Derived from Human Papillomavirus
VAKGLSTLLH

SEQ ID NO: 37596 - protein, 9 aa, Artificial Sequence
  Peptide Derived from Human Papillomavirus
VAMLDDATH

SEQ ID NO: 37597 - protein, 11 aa, Artificial Sequence
  Peptide Derived from Human Papillomavirus
VDPHCSITELK

SEQ ID NO: 37598 - protein, 8 aa, Artificial Sequence
  Peptide Derived from Human Papillomavirus
VDTDLSPR

SEQ ID NO: 37599 - protein, 10 aa, Artificial Sequence
  Peptide Derived from Human Papillomavirus
VFKDIYGLSF

SEQ ID NO: 37600 - protein, 8 aa, Artificial Sequence
  Peptide Derived from Human Papillomavirus
VFTFPHAF

SEQ ID NO: 37601 - protein, 10 aa, Artificial Sequence
  Peptide Derived from Human Papillomavirus
VFTFPHAFPF

SEQ ID NO: 37602 - protein, 10 aa, Artificial Sequence
  Peptide Derived from Human Papillomavirus
VISDDEDETA

SEQ ID NO: 37603 - protein, 8 aa, Artificial Sequence
  Peptide Derived from Human Papillomavirus
VLHLLKRK

SEQ ID NO: 37604 - protein, 9 aa, Artificial Sequence
  Peptide Derived from Human Papillomavirus
VLHLLKRKF

SEQ ID NO: 37605 - protein, 10 aa, Artificial Sequence
  Peptide Derived from Human Papillomavirus
VLHLLKRKFA

SEQ ID NO: 37606 - protein, 8 aa, Artificial Sequence
  Peptide Derived from Human Papillomavirus
VLILALLR

SEQ ID NO: 37607 - protein, 9 aa, Artificial Sequence
  Peptide Derived from Human Papillomavirus
VLILALLRY

SEQ ID NO: 37608 - protein, 10 aa, Artificial Sequence
  Peptide Derived from Human Papillomavirus
VLILALLRYK

SEQ ID NO: 37609 - protein, 8 aa, Artificial Sequence
  Peptide Derived from Human Papillomavirus
VMCRHYKR

SEQ ID NO: 37610 - protein, 9 aa, Artificial Sequence
  Peptide Derived from Human Papillomavirus
VMCRHYKRA

SEQ ID NO: 37611 - protein, 11 aa, Artificial Sequence
  Peptide Derived from Human Papillomavirus
VMCRHYKRAQK

SEQ ID NO: 37612 - protein, 11 aa, Artificial Sequence
  Peptide Derived from Human Papillomavirus
VSGDTPEWIQR

SEQ ID NO: 37613 - protein, 8 aa, Artificial Sequence
  Peptide Derived from Human Papillomavirus
VTVFTFPH

SEQ ID NO: 37614 - protein, 9 aa, Artificial Sequence
  Peptide Derived from Human Papillomavirus
VTVFTFPHA

SEQ ID NO: 37615 - protein, 10 aa, Artificial Sequence
  Peptide Derived from Human Papillomavirus
VTVFTFPHAF

SEQ ID NO: 37616 - protein, 10 aa, Artificial Sequence
  Peptide Derived from Human Papillomavirus
WFFVETIVEK

SEQ ID NO: 37617 - protein, 11 aa, Artificial Sequence
  Peptide Derived from Human Papillomavirus
WFFVETIVEKK

SEQ ID NO: 37618 - protein, 10 aa, Artificial Sequence
  Peptide Derived from Human Papillomavirus
WGVLILALLR

SEQ ID NO: 37619 - protein, 11 aa, Artificial Sequence
  Peptide Derived from Human Papillomavirus
WGVLILALLRY

SEQ ID NO: 37620 - protein, 8 aa, Artificial Sequence
  Peptide Derived from Human Papillomavirus
WIKYRCSK

SEQ ID NO: 37621 - protein, 10 aa, Artificial Sequence
  Peptide Derived from Human Papillomavirus
WIQRLTIIQH

SEQ ID NO: 37622 - protein, 9 aa, Artificial Sequence
  Peptide Derived from Human Papillomavirus
WLEPLADTK

SEQ ID NO: 37623 - protein, 11 aa, Artificial Sequence
  Peptide Derived from Human Papillomavirus
WLEPLADTKVA

SEQ ID NO: 37624 - protein, 9 aa, Artificial Sequence
  Peptide Derived from Human Papillomavirus
WTYFDNYMR

SEQ ID NO: 37625 - protein, 11 aa, Artificial Sequence
  Peptide Derived from Human Papillomavirus
WTYFDNYMRNA

SEQ ID NO: 37626 - protein, 10 aa, Artificial Sequence
  Peptide Derived from Human Papillomavirus
YAHIQCLDCK

SEQ ID NO: 37627 - protein, 11 aa, Artificial Sequence
  Peptide Derived from Human Papillomavirus
YAQLADCNSNA

SEQ ID NO: 37628 - protein, 9 aa, Artificial Sequence
  Peptide Derived from Human Papillomavirus
YFDNYMRNA

SEQ ID NO: 37629 - protein, 8 aa, Artificial Sequence
  Peptide Derived from Human Papillomavirus
YFGMSFIH

SEQ ID NO: 37630 - protein, 9 aa, Artificial Sequence
  Peptide Derived from Human Papillomavirus
YFGMSFIHF

SEQ ID NO: 37631 - protein, 8 aa, Artificial Sequence
  Peptide Derived from Human Papillomavirus
YGCSEVEA

SEQ ID NO: 37632 - protein, 9 aa, Artificial Sequence
  Peptide Derived from Human Papillomavirus
YGCSEVEAA

SEQ ID NO: 37633 - protein, 10 aa, Artificial Sequence
  Peptide Derived from Human Papillomavirus
YGLSFTDLVR

SEQ ID NO: 37634 - protein, 8 aa, Artificial Sequence
  Peptide Derived from Human Papillomavirus
YGPANTGK

SEQ ID NO: 37635 - protein, 10 aa, Artificial Sequence
  Peptide Derived from Human Papillomavirus
YGPANTGKSY

SEQ ID NO: 37636 - protein, 11 aa, Artificial Sequence
  Peptide Derived from Human Papillomavirus
YGPANTGKSYF

SEQ ID NO: 37637 - protein, 9 aa, Artificial Sequence
  Peptide Derived from Human Papillomavirus
YLESRVTVF

SEQ ID NO: 37638 - protein, 11 aa, Artificial Sequence
  Peptide Derived from Human Papillomavirus
YLESRVTVFTF

SEQ ID NO: 37639 - protein, 10 aa, Artificial Sequence
  Peptide Derived from Human Papillomavirus
YLKDCAVMCR

SEQ ID NO: 37640 - protein, 11 aa, Artificial Sequence
  Peptide Derived from Human Papillomavirus
YLKDCAVMCRH

SEQ ID NO: 37641 - protein, 10 aa, Artificial Sequence
  Peptide Derived from Human Papillomavirus
AACVSYWGVY

SEQ ID NO: 37642 - protein, 11 aa, Artificial Sequence
  Peptide Derived from Human Papillomavirus
AACVSYWGVYY

SEQ ID NO: 37643 - protein, 9 aa, Artificial Sequence
  Peptide Derived from Human Papillomavirus
ACVSYWGVY

SEQ ID NO: 37644 - protein, 10 aa, Artificial Sequence
  Peptide Derived from Human Papillomavirus
ACVSYWGVYY

SEQ ID NO: 37645 - protein, 9 aa, Artificial Sequence
  Peptide Derived from Human Papillomavirus
AIELQMALK

SEQ ID NO: 37646 - protein, 9 aa, Artificial Sequence
  Peptide Derived from Human Papillomavirus
AILFTAREH

SEQ ID NO: 37647 - protein, 9 aa, Artificial Sequence
  Peptide Derived from Human Papillomavirus
ALKGLAQSK

SEQ ID NO: 37648 - protein, 10 aa, Artificial Sequence
  Peptide Derived from Human Papillomavirus
ALKGLAQSKY

SEQ ID NO: 37649 - protein, 9 aa, Artificial Sequence
  Peptide Derived from Human Papillomavirus
ALQDKILDH

SEQ ID NO: 37650 - protein, 10 aa, Artificial Sequence
  Peptide Derived from Human Papillomavirus
ALQDKILDHY

SEQ ID NO: 37651 - protein, 9 aa, Artificial Sequence
  Peptide Derived from Human Papillomavirus
ASTSTPKTA

SEQ ID NO: 37652 - protein, 9 aa, Artificial Sequence
  Peptide Derived from Human Papillomavirus
ASVGTPKPH

SEQ ID NO: 37653 - protein, 10 aa, Artificial Sequence
  Peptide Derived from Human Papillomavirus
ATQIVRQLQH

SEQ ID NO: 37654 - protein, 11 aa, Artificial Sequence
  Peptide Derived from Human Papillomavirus
ATQIVRQLQHA

SEQ ID NO: 37655 - protein, 10 aa, Artificial Sequence
  Peptide Derived from Human Papillomavirus
CFKKGGKTVH

SEQ ID NO: 37656 - protein, 8 aa, Artificial Sequence
  Peptide Derived from Human Papillomavirus
CGLTEQHH

SEQ ID NO: 37657 - protein, 10 aa, Artificial Sequence
  Peptide Derived from Human Papillomavirus
CGLTEQHHGR

SEQ ID NO: 37658 - protein, 8 aa, Artificial Sequence
  Peptide Derived from Human Papillomavirus
CLRYRLRK

SEQ ID NO: 37659 - protein, 9 aa, Artificial Sequence
  Peptide Derived from Human Papillomavirus
CLRYRLRKY

SEQ ID NO: 37660 - protein, 10 aa, Artificial Sequence
  Peptide Derived from Human Papillomavirus
CLRYRLRKYA

SEQ ID NO: 37661 - protein, 11 aa, Artificial Sequence
  Peptide Derived from Human Papillomavirus
CMNYVVWDSIY

SEQ ID NO: 37662 - protein, 10 aa, Artificial Sequence
  Peptide Derived from Human Papillomavirus
CSGNTTPIIH

SEQ ID NO: 37663 - protein, 8 aa, Artificial Sequence
  Peptide Derived from Human Papillomavirus
CSSTSNNK

SEQ ID NO: 37664 - protein, 9 aa, Artificial Sequence
  Peptide Derived from Human Papillomavirus
CSSTSNNKR

SEQ ID NO: 37665 - protein, 10 aa, Artificial Sequence
  Peptide Derived from Human Papillomavirus
CSSTSNNKRR

SEQ ID NO: 37666 - protein, 11 aa, Artificial Sequence
  Peptide Derived from Human Papillomavirus
CSSTSNNKRRK

SEQ ID NO: 37667 - protein, 10 aa, Artificial Sequence
  Peptide Derived from Human Papillomavirus
CSTSDDTVSA

SEQ ID NO: 37668 - protein, 8 aa, Artificial Sequence
  Peptide Derived from Human Papillomavirus
CVSYWGVY

SEQ ID NO: 37669 - protein, 9 aa, Artificial Sequence
  Peptide Derived from Human Papillomavirus
CVSYWGVYY

SEQ ID NO: 37670 - protein, 11 aa, Artificial Sequence
  Peptide Derived from Human Papillomavirus
CVSYWGVYYIK

SEQ ID NO: 37671 - protein, 11 aa, Artificial Sequence
  Peptide Derived from Human Papillomavirus
DDTVSATQIVR

SEQ ID NO: 37672 - protein, 10 aa, Artificial Sequence
  Peptide Derived from Human Papillomavirus
DGDTTYYVQF

SEQ ID NO: 37673 - protein, 11 aa, Artificial Sequence
  Peptide Derived from Human Papillomavirus
DGDTTYYVQFK

SEQ ID NO: 37674 - protein, 10 aa, Artificial Sequence
  Peptide Derived from Human Papillomavirus
DGNKDNCMNY

SEQ ID NO: 37675 - protein, 8 aa, Artificial Sequence
  Peptide Derived from Human Papillomavirus
DINSQISY

SEQ ID NO: 37676 - protein, 11 aa, Artificial Sequence
  Peptide Derived from Human Papillomavirus
DSKDINSQISY

SEQ ID NO: 37677 - protein, 8 aa, Artificial Sequence
  Peptide Derived from Human Papillomavirus
DTTYYVQF

SEQ ID NO: 37678 - protein, 9 aa, Artificial Sequence
  Peptide Derived from Human Papillomavirus
DTTYYVQFK

SEQ ID NO: 37679 - protein, 10 aa, Artificial Sequence
  Peptide Derived from Human Papillomavirus
DTVSATQIVR

SEQ ID NO: 37680 - protein, 10 aa, Artificial Sequence
  Peptide Derived from Human Papillomavirus
ELQMALKGLA

SEQ ID NO: 37681 - protein, 11 aa, Artificial Sequence
  Peptide Derived from Human Papillomavirus
ELWNTEPSQCF

SEQ ID NO: 37682 - protein, 9 aa, Artificial Sequence
  Peptide Derived from Human Papillomavirus
ESLSERLSA

SEQ ID NO: 37683 - protein, 9 aa, Artificial Sequence
  Peptide Derived from Human Papillomavirus
ETGIWDKTA

SEQ ID NO: 37684 - protein, 10 aa, Artificial Sequence
  Peptide Derived from Human Papillomavirus
ETGIWDKTAA

SEQ ID NO: 37685 - protein, 11 aa, Artificial Sequence
  Peptide Derived from Human Papillomavirus
FDGNKDNCMNY

SEQ ID NO: 37686 - protein, 10 aa, Artificial Sequence
  Peptide Derived from Human Papillomavirus
FTAREHGITK

SEQ ID NO: 37687 - protein, 10 aa, Artificial Sequence
  Peptide Derived from Human Papillomavirus
GDKNSLKCLR

SEQ ID NO: 37688 - protein, 11 aa, Artificial Sequence
  Peptide Derived from Human Papillomavirus
GDKNSLKCLRY

SEQ ID NO: 37689 - protein, 9 aa, Artificial Sequence
  Peptide Derived from Human Papillomavirus
GDTTYYVQF

SEQ ID NO: 37690 - protein, 10 aa, Artificial Sequence
  Peptide Derived from Human Papillomavirus
GDTTYYVQFK

SEQ ID NO: 37691 - protein, 8 aa, Artificial Sequence
  Peptide Derived from Human Papillomavirus
GGKTVHVY

SEQ ID NO: 37692 - protein, 9 aa, Artificial Sequence
  Peptide Derived from Human Papillomavirus
GGKTVHVYF

SEQ ID NO: 37693 - protein, 8 aa, Artificial Sequence
  Peptide Derived from Human Papillomavirus
GIWDKTAA

SEQ ID NO: 37694 - protein, 9 aa, Artificial Sequence
  Peptide Derived from Human Papillomavirus
GLTEQHHGR

SEQ ID NO: 37695 - protein, 11 aa, Artificial Sequence
  Peptide Derived from Human Papillomavirus
GTPKPHIQTPA

SEQ ID NO: 37696 - protein, 8 aa, Artificial Sequence
  Peptide Derived from Human Papillomavirus
HASTSTPK

SEQ ID NO: 37697 - protein, 10 aa, Artificial Sequence
  Peptide Derived from Human Papillomavirus
HASTSTPKTA

SEQ ID NO: 37698 - protein, 8 aa, Artificial Sequence
  Peptide Derived from Human Papillomavirus
HGITKLNH

SEQ ID NO: 37699 - protein, 9 aa, Artificial Sequence
  Peptide Derived from Human Papillomavirus
HGRVNTHVH

SEQ ID NO: 37700 - protein, 8 aa, Artificial Sequence
  Peptide Derived from Human Papillomavirus
HIQTPATK

SEQ ID NO: 37701 - protein, 9 aa, Artificial Sequence
  Peptide Derived from Human Papillomavirus
HIQTPATKR

SEQ ID NO: 37702 - protein, 11 aa, Artificial Sequence
  Peptide Derived from Human Papillomavirus
HIQTPATKRPR

SEQ ID NO: 37703 - protein, 10 aa, Artificial Sequence
  Peptide Derived from Human Papillomavirus
HLKGDKNSLK

SEQ ID NO: 37704 - protein, 8 aa, Artificial Sequence
  Peptide Derived from Human Papillomavirus
HVYFDGNK

SEQ ID NO: 37705 - protein, 8 aa, Artificial Sequence
  Peptide Derived from Human Papillomavirus
IIHLKGDK

SEQ ID NO: 37706 - protein, 10 aa, Artificial Sequence
  Peptide Derived from Human Papillomavirus
ILDHYENDSK

SEQ ID NO: 37707 - protein, 8 aa, Artificial Sequence
  Peptide Derived from Human Papillomavirus
ILFTAREH

SEQ ID NO: 37708 - protein, 8 aa, Artificial Sequence
  Peptide Derived from Human Papillomavirus
ISKSKAHK

SEQ ID NO: 37709 - protein, 9 aa, Artificial Sequence
  Peptide Derived from Human Papillomavirus
ISKSKAHKA

SEQ ID NO: 37710 - protein, 8 aa, Artificial Sequence
  Peptide Derived from Human Papillomavirus
ISYWQLIR

SEQ ID NO: 37711 - protein, 9 aa, Artificial Sequence
  Peptide Derived from Human Papillomavirus
ITETGIWDK

SEQ ID NO: 37712 - protein, 11 aa, Artificial Sequence
  Peptide Derived from Human Papillomavirus
ITETGIWDKTA

SEQ ID NO: 37713 - protein, 8 aa, Artificial Sequence
  Peptide Derived from Human Papillomavirus
IVRQLQHA

SEQ ID NO: 37714 - protein, 11 aa, Artificial Sequence
  Peptide Derived from Human Papillomavirus
KAHKAIELQMA

SEQ ID NO: 37715 - protein, 8 aa, Artificial Sequence
  Peptide Derived from Human Papillomavirus
KAIELQMA

SEQ ID NO: 37716 - protein, 10 aa, Artificial Sequence
  Peptide Derived from Human Papillomavirus
KAIELQMALK

SEQ ID NO: 37717 - protein, 8 aa, Artificial Sequence
  Peptide Derived from Human Papillomavirus
KCLRYRLR

SEQ ID NO: 37718 - protein, 9 aa, Artificial Sequence
  Peptide Derived from Human Papillomavirus
KCLRYRLRK

SEQ ID NO: 37719 - protein, 10 aa, Artificial Sequence
  Peptide Derived from Human Papillomavirus
KCLRYRLRKY

SEQ ID NO: 37720 - protein, 11 aa, Artificial Sequence
  Peptide Derived from Human Papillomavirus
KCLRYRLRKYA

SEQ ID NO: 37721 - protein, 8 aa, Artificial Sequence
  Peptide Derived from Human Papillomavirus
KDGDTTYY

SEQ ID NO: 37722 - protein, 11 aa, Artificial Sequence
  Peptide Derived from Human Papillomavirus
KDGDTTYYVQF

SEQ ID NO: 37723 - protein, 9 aa, Artificial Sequence
  Peptide Derived from Human Papillomavirus
KDINSQISY

SEQ ID NO: 37724 - protein, 8 aa, Artificial Sequence
  Peptide Derived from Human Papillomavirus
KGDKNSLK

SEQ ID NO: 37725 - protein, 11 aa, Artificial Sequence
  Peptide Derived from Human Papillomavirus
KGDKNSLKCLR

SEQ ID NO: 37726 - protein, 9 aa, Artificial Sequence
  Peptide Derived from Human Papillomavirus
KGGKTVHVY

SEQ ID NO: 37727 - protein, 10 aa, Artificial Sequence
  Peptide Derived from Human Papillomavirus
KGGKTVHVYF

SEQ ID NO: 37728 - protein, 8 aa, Artificial Sequence
  Peptide Derived from Human Papillomavirus
KGLAQSKY

SEQ ID NO: 37729 - protein, 11 aa, Artificial Sequence
  Peptide Derived from Human Papillomavirus
KILDHYENDSK

SEQ ID NO: 37730 - protein, 8 aa, Artificial Sequence
  Peptide Derived from Human Papillomavirus
KTAACVSY

SEQ ID NO: 37731 - protein, 9 aa, Artificial Sequence
  Peptide Derived from Human Papillomavirus
KTASVGTPK

SEQ ID NO: 37732 - protein, 11 aa, Artificial Sequence
  Peptide Derived from Human Papillomavirus
KTASVGTPKPH

SEQ ID NO: 37733 - protein, 11 aa, Artificial Sequence
  Peptide Derived from Human Papillomavirus
KTVHVYFDGNK

SEQ ID NO: 37734 - protein, 9 aa, Artificial Sequence
  Peptide Derived from Human Papillomavirus
LCSSTSNNK

SEQ ID NO: 37735 - protein, 10 aa, Artificial Sequence
  Peptide Derived from Human Papillomavirus
LCSSTSNNKR

SEQ ID NO: 37736 - protein, 11 aa, Artificial Sequence
  Peptide Derived from Human Papillomavirus
LCSSTSNNKRR

SEQ ID NO: 37737 - protein, 9 aa, Artificial Sequence
  Peptide Derived from Human Papillomavirus
LDHYENDSK

SEQ ID NO: 37738 - protein, 11 aa, Artificial Sequence
  Peptide Derived from Human Papillomavirus
LFTAREHGITK

SEQ ID NO: 37739 - protein, 10 aa, Artificial Sequence
  Peptide Derived from Human Papillomavirus
LIRLENAILF

SEQ ID NO: 37740 - protein, 10 aa, Artificial Sequence
  Peptide Derived from Human Papillomavirus
LLCSSTSNNK

SEQ ID NO: 37741 - protein, 11 aa, Artificial Sequence
  Peptide Derived from Human Papillomavirus
LLCSSTSNNKR

SEQ ID NO: 37742 - protein, 11 aa, Artificial Sequence
  Peptide Derived from Human Papillomavirus
LSALQDKILDH

SEQ ID NO: 37743 - protein, 11 aa, Artificial Sequence
  Peptide Derived from Human Papillomavirus
LSERLSALQDK

SEQ ID NO: 37744 - protein, 8 aa, Artificial Sequence
  Peptide Derived from Human Papillomavirus
LTEQHHGR

SEQ ID NO: 37745 - protein, 11 aa, Artificial Sequence
  Peptide Derived from Human Papillomavirus
LTVTYNSEVQR

SEQ ID NO: 37746 - protein, 10 aa, Artificial Sequence
  Peptide Derived from Human Papillomavirus
MALKGLAQSK

SEQ ID NO: 37747 - protein, 11 aa, Artificial Sequence
  Peptide Derived from Human Papillomavirus
MALKGLAQSKY

SEQ ID NO: 37748 - protein, 11 aa, Artificial Sequence
  Peptide Derived from Human Papillomavirus
MCSTSDDTVSA

SEQ ID NO: 37749 - protein, 8 aa, Artificial Sequence
  Peptide Derived from Human Papillomavirus
NAILFTAR

SEQ ID NO: 37750 - protein, 10 aa, Artificial Sequence
  Peptide Derived from Human Papillomavirus
NAILFTAREH

SEQ ID NO: 37751 - protein, 8 aa, Artificial Sequence
  Peptide Derived from Human Papillomavirus
NISKSKAH

SEQ ID NO: 37752 - protein, 9 aa, Artificial Sequence
  Peptide Derived from Human Papillomavirus
NISKSKAHK

SEQ ID NO: 37753 - protein, 10 aa, Artificial Sequence
  Peptide Derived from Human Papillomavirus
NISKSKAHKA

SEQ ID NO: 37754 - protein, 9 aa, Artificial Sequence
  Peptide Derived from Human Papillomavirus
NSEVQRNTF

SEQ ID NO: 37755 - protein, 8 aa, Artificial Sequence
  Peptide Derived from Human Papillomavirus
NSLKCLRY

SEQ ID NO: 37756 - protein, 9 aa, Artificial Sequence
  Peptide Derived from Human Papillomavirus
NSLKCLRYR

SEQ ID NO: 37757 - protein, 11 aa, Artificial Sequence
  Peptide Derived from Human Papillomavirus
NSLKCLRYRLR

SEQ ID NO: 37758 - protein, 9 aa, Artificial Sequence
  Peptide Derived from Human Papillomavirus
NSNTWEVQY

SEQ ID NO: 37759 - protein, 11 aa, Artificial Sequence
  Peptide Derived from Human Papillomavirus
NSQISYWQLIR

SEQ ID NO: 37760 - protein, 9 aa, Artificial Sequence
  Peptide Derived from Human Papillomavirus
NSVQISVGY

SEQ ID NO: 37761 - protein, 8 aa, Artificial Sequence
  Peptide Derived from Human Papillomavirus
NTEPSQCF

SEQ ID NO: 37762 - protein, 9 aa, Artificial Sequence
  Peptide Derived from Human Papillomavirus
NTEPSQCFK

SEQ ID NO: 37763 - protein, 10 aa, Artificial Sequence
  Peptide Derived from Human Papillomavirus
NTEPSQCFKK

SEQ ID NO: 37764 - protein, 9 aa, Artificial Sequence
  Peptide Derived from Human Papillomavirus
NTGILTVTY

SEQ ID NO: 37765 - protein, 9 aa, Artificial Sequence
  Peptide Derived from Human Papillomavirus
NTTPIIHLK

SEQ ID NO: 37766 - protein, 9 aa, Artificial Sequence
  Peptide Derived from Human Papillomavirus
PIIHLKGDK

SEQ ID NO: 37767 - protein, 8 aa, Artificial Sequence
  Peptide Derived from Human Papillomavirus
PINISKSK

SEQ ID NO: 37768 - protein, 9 aa, Artificial Sequence
  Peptide Derived from Human Papillomavirus
PINISKSKA

SEQ ID NO: 37769 - protein, 10 aa, Artificial Sequence
  Peptide Derived from Human Papillomavirus
PINISKSKAH

SEQ ID NO: 37770 - protein, 11 aa, Artificial Sequence
  Peptide Derived from Human Papillomavirus
PINISKSKAHK

SEQ ID NO: 37771 - protein, 11 aa, Artificial Sequence
  Peptide Derived from Human Papillomavirus
PLLCSSTSNNK

SEQ ID NO: 37772 - protein, 10 aa, Artificial Sequence
  Peptide Derived from Human Papillomavirus
PSQCFKKGGK

SEQ ID NO: 37773 - protein, 8 aa, Artificial Sequence
  Peptide Derived from Human Papillomavirus
QCFKKGGK

SEQ ID NO: 37774 - protein, 11 aa, Artificial Sequence
  Peptide Derived from Human Papillomavirus
QCFKKGGKTVH

SEQ ID NO: 37775 - protein, 8 aa, Artificial Sequence
  Peptide Derived from Human Papillomavirus
QCGLTEQH

SEQ ID NO: 37776 - protein, 9 aa, Artificial Sequence
  Peptide Derived from Human Papillomavirus
QCGLTEQHH

SEQ ID NO: 37777 - protein, 11 aa, Artificial Sequence
  Peptide Derived from Human Papillomavirus
QCGLTEQHHGR

SEQ ID NO: 37778 - protein, 8 aa, Artificial Sequence
  Peptide Derived from Human Papillomavirus
QDKILDHY

SEQ ID NO: 37779 - protein, 8 aa, Artificial Sequence
  Peptide Derived from Human Papillomavirus
QFKSECEK

SEQ ID NO: 37780 - protein, 9 aa, Artificial Sequence
  Peptide Derived from Human Papillomavirus
QFKSECEKY

SEQ ID NO: 37781 - protein, 9 aa, Artificial Sequence
  Peptide Derived from Human Papillomavirus
QISYWQLIR

SEQ ID NO: 37782 - protein, 8 aa, Artificial Sequence
  Peptide Derived from Human Papillomavirus
QIVRQLQH

SEQ ID NO: 37783 - protein, 9 aa, Artificial Sequence
  Peptide Derived from Human Papillomavirus
QIVRQLQHA

SEQ ID NO: 37784 - protein, 8 aa, Artificial Sequence
  Peptide Derived from Human Papillomavirus
QLIRLENA

SEQ ID NO: 37785 - protein, 11 aa, Artificial Sequence
  Peptide Derived from Human Papillomavirus
QLIRLENAILF

SEQ ID NO: 37786 - protein, 11 aa, Artificial Sequence
  Peptide Derived from Human Papillomavirus
QLQHASTSTPK

SEQ ID NO: 37787 - protein, 8 aa, Artificial Sequence
  Peptide Derived from Human Papillomavirus
QMALKGLA

SEQ ID NO: 37788 - protein, 11 aa, Artificial Sequence
  Peptide Derived from Human Papillomavirus
QMALKGLAQSK

SEQ ID NO: 37789 - protein, 9 aa, Artificial Sequence
  Peptide Derived from Human Papillomavirus
QTPATKRPR

SEQ ID NO: 37790 - protein, 10 aa, Artificial Sequence
  Peptide Derived from Human Papillomavirus
QTPKESLSER

SEQ ID NO: 37791 - protein, 10 aa, Artificial Sequence
  Peptide Derived from Human Papillomavirus
QVVPPINISK

SEQ ID NO: 37792 - protein, 8 aa, Artificial Sequence
  Peptide Derived from Human Papillomavirus
RLENAILF

SEQ ID NO: 37793 - protein, 10 aa, Artificial Sequence
  Peptide Derived from Human Papillomavirus
RLENAILFTA

SEQ ID NO: 37794 - protein, 11 aa, Artificial Sequence
  Peptide Derived from Human Papillomavirus
RLENAILFTAR

SEQ ID NO: 37795 - protein, 8 aa, Artificial Sequence
  Peptide Derived from Human Papillomavirus
RLRKYADH

SEQ ID NO: 37796 - protein, 9 aa, Artificial Sequence
  Peptide Derived from Human Papillomavirus
RLRKYADHY

SEQ ID NO: 37797 - protein, 8 aa, Artificial Sequence
  Peptide Derived from Human Papillomavirus
RLSALQDK

SEQ ID NO: 37798 - protein, 10 aa, Artificial Sequence
  Peptide Derived from Human Papillomavirus
SALQDKILDH

SEQ ID NO: 37799 - protein, 11 aa, Artificial Sequence
  Peptide Derived from Human Papillomavirus
SALQDKILDHY

SEQ ID NO: 37800 - protein, 11 aa, Artificial Sequence
  Peptide Derived from Human Papillomavirus
SATQIVRQLQH

SEQ ID NO: 37801 - protein, 9 aa, Artificial Sequence
  Peptide Derived from Human Papillomavirus
SGNTTPIIH

SEQ ID NO: 37802 - protein, 11 aa, Artificial Sequence
  Peptide Derived from Human Papillomavirus
SGNTTPIIHLK

SEQ ID NO: 37803 - protein, 8 aa, Artificial Sequence
  Peptide Derived from Human Papillomavirus
SLKCLRYR

SEQ ID NO: 37804 - protein, 10 aa, Artificial Sequence
  Peptide Derived from Human Papillomavirus
SLKCLRYRLR

SEQ ID NO: 37805 - protein, 11 aa, Artificial Sequence
  Peptide Derived from Human Papillomavirus
SLKCLRYRLRK

SEQ ID NO: 37806 - protein, 8 aa, Artificial Sequence
  Peptide Derived from Human Papillomavirus
SLSERLSA

SEQ ID NO: 37807 - protein, 8 aa, Artificial Sequence
  Peptide Derived from Human Papillomavirus
SSTSNNKR

SEQ ID NO: 37808 - protein, 9 aa, Artificial Sequence
  Peptide Derived from Human Papillomavirus
SSTSNNKRR

SEQ ID NO: 37809 - protein, 10 aa, Artificial Sequence
  Peptide Derived from Human Papillomavirus
SSTSNNKRRK

SEQ ID NO: 37810 - protein, 11 aa, Artificial Sequence
  Peptide Derived from Human Papillomavirus
SSTWHWTGCNK

SEQ ID NO: 37811 - protein, 9 aa, Artificial Sequence
  Peptide Derived from Human Papillomavirus
STSDDTVSA

SEQ ID NO: 37812 - protein, 8 aa, Artificial Sequence
  Peptide Derived from Human Papillomavirus
STSNNKRR

SEQ ID NO: 37813 - protein, 9 aa, Artificial Sequence
  Peptide Derived from Human Papillomavirus
STSNNKRRK

SEQ ID NO: 37814 - protein, 8 aa, Artificial Sequence
  Peptide Derived from Human Papillomavirus
STSTPKTA

SEQ ID NO: 37815 - protein, 10 aa, Artificial Sequence
  Peptide Derived from Human Papillomavirus
STWHWTGCNK

SEQ ID NO: 37816 - protein, 8 aa, Artificial Sequence
  Peptide Derived from Human Papillomavirus
SVGTPKPH

SEQ ID NO: 37817 - protein, 8 aa, Artificial Sequence
  Peptide Derived from Human Papillomavirus
SVQISVGY

SEQ ID NO: 37818 - protein, 11 aa, Artificial Sequence
  Peptide Derived from Human Papillomavirus
TAACVSYWGVY

SEQ ID NO: 37819 - protein, 9 aa, Artificial Sequence
  Peptide Derived from Human Papillomavirus
TAREHGITK

SEQ ID NO: 37820 - protein, 8 aa, Artificial Sequence
  Peptide Derived from Human Papillomavirus
TASVGTPK

SEQ ID NO: 37821 - protein, 10 aa, Artificial Sequence
  Peptide Derived from Human Papillomavirus
TASVGTPKPH

SEQ ID NO: 37822 - protein, 8 aa, Artificial Sequence
  Peptide Derived from Human Papillomavirus
TGILTVTY

SEQ ID NO: 37823 - protein, 8 aa, Artificial Sequence
  Peptide Derived from Human Papillomavirus
TGIWDKTA

SEQ ID NO: 37824 - protein, 9 aa, Artificial Sequence
  Peptide Derived from Human Papillomavirus
TGIWDKTAA

SEQ ID NO: 37825 - protein, 8 aa, Artificial Sequence
  Peptide Derived from Human Papillomavirus
TSDDTVSA

SEQ ID NO: 37826 - protein, 8 aa, Artificial Sequence
  Peptide Derived from Human Papillomavirus
TSNNKRRK

SEQ ID NO: 37827 - protein, 8 aa, Artificial Sequence
  Peptide Derived from Human Papillomavirus
TTPIIHLK

SEQ ID NO: 37828 - protein, 11 aa, Artificial Sequence
  Peptide Derived from Human Papillomavirus
TTPIIHLKGDK

SEQ ID NO: 37829 - protein, 8 aa, Artificial Sequence
  Peptide Derived from Human Papillomavirus
TTYYVQFK

SEQ ID NO: 37830 - protein, 10 aa, Artificial Sequence
  Peptide Derived from Human Papillomavirus
TVHVYFDGNK

SEQ ID NO: 37831 - protein, 9 aa, Artificial Sequence
  Peptide Derived from Human Papillomavirus
TVSATQIVR

SEQ ID NO: 37832 - protein, 10 aa, Artificial Sequence
  Peptide Derived from Human Papillomavirus
TVTYNSEVQR

SEQ ID NO: 37833 - protein, 11 aa, Artificial Sequence
  Peptide Derived from Human Papillomavirus
VCSGNTTPIIH

SEQ ID NO: 37834 - protein, 8 aa, Artificial Sequence
  Peptide Derived from Human Papillomavirus
VSATQIVR

SEQ ID NO: 37835 - protein, 8 aa, Artificial Sequence
  Peptide Derived from Human Papillomavirus
VSYWGVYY

SEQ ID NO: 37836 - protein, 10 aa, Artificial Sequence
  Peptide Derived from Human Papillomavirus
VSYWGVYYIK

SEQ ID NO: 37837 - protein, 9 aa, Artificial Sequence
  Peptide Derived from Human Papillomavirus
VTYNSEVQR

SEQ ID NO: 37838 - protein, 9 aa, Artificial Sequence
  Peptide Derived from Human Papillomavirus
VVPPINISK

SEQ ID NO: 37839 - protein, 11 aa, Artificial Sequence
  Peptide Derived from Human Papillomavirus
VVPPINISKSK

SEQ ID NO: 37840 - protein, 8 aa, Artificial Sequence
  Peptide Derived from Human Papillomavirus
VVWDSIYY

SEQ ID NO: 37841 - protein, 10 aa, Artificial Sequence
  Peptide Derived from Human Papillomavirus
WDKTAACVSY

SEQ ID NO: 37842 - protein, 11 aa, Artificial Sequence
  Peptide Derived from Human Papillomavirus
YGNSNTWEVQY

SEQ ID NO: 37843 - protein, 9 aa, Artificial Sequence
  Peptide Derived from Human Papillomavirus
YIKDGDTTY

SEQ ID NO: 37844 - protein, 10 aa, Artificial Sequence
  Peptide Derived from Human Papillomavirus
YIKDGDTTYY

SEQ ID NO: 37845 - protein, 10 aa, Artificial Sequence
  Peptide Derived from Human Papillomavirus
YITETGIWDK

SEQ ID NO: 37846 - protein, 9 aa, Artificial Sequence
  Peptide Derived from Human Papillomavirus
YSEISSTWH

SEQ ID NO: 37847 - protein, 10 aa, Artificial Sequence
  Peptide Derived from Human Papillomavirus
YVQFKSECEK

SEQ ID NO: 37848 - protein, 11 aa, Artificial Sequence
  Peptide Derived from Human Papillomavirus
YVQFKSECEKY

SEQ ID NO: 37849 - protein, 8 aa, Artificial Sequence
  Peptide Derived from Human Papillomavirus
YVVWDSIY

SEQ ID NO: 37850 - protein, 9 aa, Artificial Sequence
  Peptide Derived from Human Papillomavirus
YVVWDSIYY

SEQ ID NO: 37851 - protein, 9 aa, Artificial Sequence
  Peptide Derived from Human Papillomavirus
AACHKCIDF

SEQ ID NO: 37852 - protein, 10 aa, Artificial Sequence
  Peptide Derived from Human Papillomavirus
AACHKCIDFY

SEQ ID NO: 37853 - protein, 8 aa, Artificial Sequence
  Peptide Derived from Human Papillomavirus
ACHKCIDF

SEQ ID NO: 37854 - protein, 9 aa, Artificial Sequence
  Peptide Derived from Human Papillomavirus
ACHKCIDFY

SEQ ID NO: 37855 - protein, 11 aa, Artificial Sequence
  Peptide Derived from Human Papillomavirus
ACHKCIDFYSR

SEQ ID NO: 37856 - protein, 11 aa, Artificial Sequence
  Peptide Derived from Human Papillomavirus
ACVYCKATLER

SEQ ID NO: 37857 - protein, 9 aa, Artificial Sequence
  Peptide Derived from Human Papillomavirus
AFKDLFIVY

SEQ ID NO: 37858 - protein, 10 aa, Artificial Sequence
  Peptide Derived from Human Papillomavirus
AFKDLFIVYR

SEQ ID NO: 37859 - protein, 9 aa, Artificial Sequence
  Peptide Derived from Human Papillomavirus
ATLERTEVY

SEQ ID NO: 37860 - protein, 11 aa, Artificial Sequence
  Peptide Derived from Human Papillomavirus
ATLERTEVYQF

SEQ ID NO: 37861 - protein, 9 aa, Artificial Sequence
  Peptide Derived from Human Papillomavirus
CCDQARQER

SEQ ID NO: 37862 - protein, 11 aa, Artificial Sequence
  Peptide Derived from Human Papillomavirus
CCDQARQERLR

SEQ ID NO: 37863 - protein, 8 aa, Artificial Sequence
  Peptide Derived from Human Papillomavirus
CDQARQER

SEQ ID NO: 37864 - protein, 10 aa, Artificial Sequence
  Peptide Derived from Human Papillomavirus
CDQARQERLR

SEQ ID NO: 37865 - protein, 11 aa, Artificial Sequence
  Peptide Derived from Human Papillomavirus
CDQARQERLRR

SEQ ID NO: 37866 - protein, 8 aa, Artificial Sequence
  Peptide Derived from Human Papillomavirus
CIAYAACH

SEQ ID NO: 37867 - protein, 9 aa, Artificial Sequence
  Peptide Derived from Human Papillomavirus
CIAYAACHK

SEQ ID NO: 37868 - protein, 9 aa, Artificial Sequence
  Peptide Derived from Human Papillomavirus
CIDFYSRIR

SEQ ID NO: 37869 - protein, 11 aa, Artificial Sequence
  Peptide Derived from Human Papillomavirus
CLRCQKPLNPA

SEQ ID NO: 37870 - protein, 10 aa, Artificial Sequence
  Peptide Derived from Human Papillomavirus
CVYCKATLER

SEQ ID NO: 37871 - protein, 9 aa, Artificial Sequence
  Peptide Derived from Human Papillomavirus
DCIAYAACH

SEQ ID NO: 37872 - protein, 10 aa, Artificial Sequence
  Peptide Derived from Human Papillomavirus
DCIAYAACHK

SEQ ID NO: 37873 - protein, 8 aa, Artificial Sequence
  Peptide Derived from Human Papillomavirus
DDPTQRPY

SEQ ID NO: 37874 - protein, 9 aa, Artificial Sequence
  Peptide Derived from Human Papillomavirus
DDPTQRPYK

SEQ ID NO: 37875 - protein, 10 aa, Artificial Sequence
  Peptide Derived from Human Papillomavirus
DFYSRIRELR

SEQ ID NO: 37876 - protein, 11 aa, Artificial Sequence
  Peptide Derived from Human Papillomavirus
DFYSRIRELRY

SEQ ID NO: 37877 - protein, 11 aa, Artificial Sequence
  Peptide Derived from Human Papillomavirus
DLFIVYRDCIA

SEQ ID NO: 37878 - protein, 8 aa, Artificial Sequence
  Peptide Derived from Human Papillomavirus
DVSIACVY

SEQ ID NO: 37879 - protein, 10 aa, Artificial Sequence
  Peptide Derived from Human Papillomavirus
DVSIACVYCK

SEQ ID NO: 37880 - protein, 11 aa, Artificial Sequence
  Peptide Derived from Human Papillomavirus
DVSIACVYCKA

SEQ ID NO: 37881 - protein, 10 aa, Artificial Sequence
  Peptide Derived from Human Papillomavirus
ELRYYSNSVY

SEQ ID NO: 37882 - protein, 8 aa, Artificial Sequence
  Peptide Derived from Human Papillomavirus
ELYNLLIR

SEQ ID NO: 37883 - protein, 11 aa, Artificial Sequence
  Peptide Derived from Human Papillomavirus
ELYNLLIRCLR

SEQ ID NO: 37884 - protein, 8 aa, Artificial Sequence
  Peptide Derived from Human Papillomavirus
EVYQFAFK

SEQ ID NO: 37885 - protein, 11 aa, Artificial Sequence
  Peptide Derived from Human Papillomavirus
EVYQFAFKDLF

SEQ ID NO: 37886 - protein, 10 aa, Artificial Sequence
  Peptide Derived from Human Papillomavirus
FAFKDLFIVY

SEQ ID NO: 37887 - protein, 11 aa, Artificial Sequence
  Peptide Derived from Human Papillomavirus
FAFKDLFIVYR

SEQ ID NO: 37888 - protein, 9 aa, Artificial Sequence
  Peptide Derived from Human Papillomavirus
FDDPTQRPY

SEQ ID NO: 37889 - protein, 10 aa, Artificial Sequence
  Peptide Derived from Human Papillomavirus
FDDPTQRPYK

SEQ ID NO: 37890 - protein, 9 aa, Artificial Sequence
  Peptide Derived from Human Papillomavirus
FIVYRDCIA

SEQ ID NO: 37891 - protein, 10 aa, Artificial Sequence
  Peptide Derived from Human Papillomavirus
FIVYRDCIAY

SEQ ID NO: 37892 - protein, 11 aa, Artificial Sequence
  Peptide Derived from Human Papillomavirus
FIVYRDCIAYA

SEQ ID NO: 37893 - protein, 8 aa, Artificial Sequence
  Peptide Derived from Human Papillomavirus
HLKDKRRF

SEQ ID NO: 37894 - protein, 9 aa, Artificial Sequence
  Peptide Derived from Human Papillomavirus
HLKDKRRFH

SEQ ID NO: 37895 - protein, 8 aa, Artificial Sequence
  Peptide Derived from Human Papillomavirus
HSIAGQYR

SEQ ID NO: 37896 - protein, 8 aa, Artificial Sequence
  Peptide Derived from Human Papillomavirus
IACVYCKA

SEQ ID NO: 37897 - protein, 8 aa, Artificial Sequence
  Peptide Derived from Human Papillomavirus
IAYAACHK

SEQ ID NO: 37898 - protein, 8 aa, Artificial Sequence
  Peptide Derived from Human Papillomavirus
IDFYSRIR

SEQ ID NO: 37899 - protein, 11 aa, Artificial Sequence
  Peptide Derived from Human Papillomavirus
IDFYSRIRELR

SEQ ID NO: 37900 - protein, 8 aa, Artificial Sequence
  Peptide Derived from Human Papillomavirus
IVYRDCIA

SEQ ID NO: 37901 - protein, 9 aa, Artificial Sequence
  Peptide Derived from Human Papillomavirus
IVYRDCIAY

SEQ ID NO: 37902 - protein, 10 aa, Artificial Sequence
  Peptide Derived from Human Papillomavirus
IVYRDCIAYA

SEQ ID NO: 37903 - protein, 11 aa, Artificial Sequence
  Peptide Derived from Human Papillomavirus
IVYRDCIAYAA

SEQ ID NO: 37904 - protein, 10 aa, Artificial Sequence
  Peptide Derived from Human Papillomavirus
KATLERTEVY

SEQ ID NO: 37905 - protein, 8 aa, Artificial Sequence
  Peptide Derived from Human Papillomavirus
KCIDFYSR

SEQ ID NO: 37906 - protein, 10 aa, Artificial Sequence
  Peptide Derived from Human Papillomavirus
KCIDFYSRIR

SEQ ID NO: 37907 - protein, 10 aa, Artificial Sequence
  Peptide Derived from Human Papillomavirus
KDKRRFHSIA

SEQ ID NO: 37908 - protein, 8 aa, Artificial Sequence
  Peptide Derived from Human Papillomavirus
KDLFIVYR

SEQ ID NO: 37909 - protein, 8 aa, Artificial Sequence
  Peptide Derived from Human Papillomavirus
KITNTELY

SEQ ID NO: 37910 - protein, 10 aa, Artificial Sequence
  Peptide Derived from Human Papillomavirus
LFIVYRDCIA

SEQ ID NO: 37911 - protein, 11 aa, Artificial Sequence
  Peptide Derived from Human Papillomavirus
LFIVYRDCIAY

SEQ ID NO: 37912 - protein, 9 aa, Artificial Sequence
  Peptide Derived from Human Papillomavirus
LIRCLRCQK

SEQ ID NO: 37913 - protein, 10 aa, Artificial Sequence
  Peptide Derived from Human Papillomavirus
LLIRCLRCQK

SEQ ID NO: 37914 - protein, 10 aa, Artificial Sequence
  Peptide Derived from Human Papillomavirus
MARFDDPTQR

SEQ ID NO: 37915 - protein, 8 aa, Artificial Sequence
  Peptide Derived from Human Papillomavirus
NLLIRCLR

SEQ ID NO: 37916 - protein, 11 aa, Artificial Sequence
  Peptide Derived from Human Papillomavirus
NLLIRCLRCQK

SEQ ID NO: 37917 - protein, 10 aa, Artificial Sequence
  Peptide Derived from Human Papillomavirus
NSVYGETLEK

SEQ ID NO: 37918 - protein, 8 aa, Artificial Sequence
  Peptide Derived from Human Papillomavirus
NTCCDQAR

SEQ ID NO: 37919 - protein, 11 aa, Artificial Sequence
  Peptide Derived from Human Papillomavirus
NTCCDQARQER

SEQ ID NO: 37920 - protein, 10 aa, Artificial Sequence
  Peptide Derived from Human Papillomavirus
NTELYNLLIR

SEQ ID NO: 37921 - protein, 10 aa, Artificial Sequence
  Peptide Derived from Human Papillomavirus
NTSLQDVSIA

SEQ ID NO: 37922 - protein, 9 aa, Artificial Sequence
  Peptide Derived from Human Papillomavirus
PAEKRRHLK

SEQ ID NO: 37923 - protein, 11 aa, Artificial Sequence
  Peptide Derived from Human Papillomavirus
PAEKRRHLKDK

SEQ ID NO: 37924 - protein, 8 aa, Artificial Sequence
  Peptide Derived from Human Papillomavirus
PLNPAEKR

SEQ ID NO: 37925 - protein, 9 aa, Artificial Sequence
  Peptide Derived from Human Papillomavirus
PLNPAEKRR

SEQ ID NO: 37926 - protein, 10 aa, Artificial Sequence
  Peptide Derived from Human Papillomavirus
PLNPAEKRRH

SEQ ID NO: 37927 - protein, 8 aa, Artificial Sequence
  Peptide Derived from Human Papillomavirus
QARQERLR

SEQ ID NO: 37928 - protein, 9 aa, Artificial Sequence
  Peptide Derived from Human Papillomavirus
QARQERLRR

SEQ ID NO: 37929 - protein, 10 aa, Artificial Sequence
  Peptide Derived from Human Papillomavirus
QARQERLRRR

SEQ ID NO: 37930 - protein, 11 aa, Artificial Sequence
  Peptide Derived from Human Papillomavirus
QARQERLRRRR

SEQ ID NO: 37931 - protein, 9 aa, Artificial Sequence
  Peptide Derived from Human Papillomavirus
QCNTCCDQA

SEQ ID NO: 37932 - protein, 10 aa, Artificial Sequence
  Peptide Derived from Human Papillomavirus
QCNTCCDQAR

SEQ ID NO: 37933 - protein, 9 aa, Artificial Sequence
  Peptide Derived from Human Papillomavirus
QDVSIACVY

SEQ ID NO: 37934 - protein, 11 aa, Artificial Sequence
  Peptide Derived from Human Papillomavirus
QDVSIACVYCK

SEQ ID NO: 37935 - protein, 8 aa, Artificial Sequence
  Peptide Derived from Human Papillomavirus
QFAFKDLF

SEQ ID NO: 37936 - protein, 11 aa, Artificial Sequence
  Peptide Derived from Human Papillomavirus
QFAFKDLFIVY

SEQ ID NO: 37937 - protein, 9 aa, Artificial Sequence
  Peptide Derived from Human Papillomavirus
RCQKPLNPA

SEQ ID NO: 37938 - protein, 11 aa, Artificial Sequence
  Peptide Derived from Human Papillomavirus
RCQKPLNPAEK

SEQ ID NO: 37939 - protein, 8 aa, Artificial Sequence
  Peptide Derived from Human Papillomavirus
RDCIAYAA

SEQ ID NO: 37940 - protein, 10 aa, Artificial Sequence
  Peptide Derived from Human Papillomavirus
RDCIAYAACH

SEQ ID NO: 37941 - protein, 11 aa, Artificial Sequence
  Peptide Derived from Human Papillomavirus
RDCIAYAACHK

SEQ ID NO: 37942 - protein, 8 aa, Artificial Sequence
  Peptide Derived from Human Papillomavirus
RFDDPTQR

SEQ ID NO: 37943 - protein, 10 aa, Artificial Sequence
  Peptide Derived from Human Papillomavirus
RFDDPTQRPY

SEQ ID NO: 37944 - protein, 11 aa, Artificial Sequence
  Peptide Derived from Human Papillomavirus
RFDDPTQRPYK

SEQ ID NO: 37945 - protein, 9 aa, Artificial Sequence
  Peptide Derived from Human Papillomavirus
RFHSIAGQY

SEQ ID NO: 37946 - protein, 10 aa, Artificial Sequence
  Peptide Derived from Human Papillomavirus
RFHSIAGQYR

SEQ ID NO: 37947 - protein, 11 aa, Artificial Sequence
  Peptide Derived from Human Papillomavirus
RGQCNTCCDQA

SEQ ID NO: 37948 - protein, 8 aa, Artificial Sequence
  Peptide Derived from Human Papillomavirus
RIRELRYY

SEQ ID NO: 37949 - protein, 8 aa, Artificial Sequence
  Peptide Derived from Human Papillomavirus
RTEVYQFA

SEQ ID NO: 37950 - protein, 9 aa, Artificial Sequence
  Peptide Derived from Human Papillomavirus
RTEVYQFAF

SEQ ID NO: 37951 - protein, 10 aa, Artificial Sequence
  Peptide Derived from Human Papillomavirus
RTEVYQFAFK

SEQ ID NO: 37952 - protein, 8 aa, Artificial Sequence
  Peptide Derived from Human Papillomavirus
SIACVYCK

SEQ ID NO: 37953 - protein, 9 aa, Artificial Sequence
  Peptide Derived from Human Papillomavirus
SIACVYCKA

SEQ ID NO: 37954 - protein, 8 aa, Artificial Sequence
  Peptide Derived from Human Papillomavirus
SLQDVSIA

SEQ ID NO: 37955 - protein, 11 aa, Artificial Sequence
  Peptide Derived from Human Papillomavirus
SLQDVSIACVY

SEQ ID NO: 37956 - protein, 9 aa, Artificial Sequence
  Peptide Derived from Human Papillomavirus
SVYGETLEK

SEQ ID NO: 37957 - protein, 10 aa, Artificial Sequence
  Peptide Derived from Human Papillomavirus
TCCDQARQER

SEQ ID NO: 37958 - protein, 11 aa, Artificial Sequence
  Peptide Derived from Human Papillomavirus
TLEKITNTELY

SEQ ID NO: 37959 - protein, 8 aa, Artificial Sequence
  Peptide Derived from Human Papillomavirus
TLERTEVY

SEQ ID NO: 37960 - protein, 10 aa, Artificial Sequence
  Peptide Derived from Human Papillomavirus
TLERTEVYQF

SEQ ID NO: 37961 - protein, 11 aa, Artificial Sequence
  Peptide Derived from Human Papillomavirus
TLERTEVYQFA

SEQ ID NO: 37962 - protein, 9 aa, Artificial Sequence
  Peptide Derived from Human Papillomavirus
TSLQDVSIA

SEQ ID NO: 37963 - protein, 9 aa, Artificial Sequence
  Peptide Derived from Human Papillomavirus
VSIACVYCK

SEQ ID NO: 37964 - protein, 10 aa, Artificial Sequence
  Peptide Derived from Human Papillomavirus
VSIACVYCKA

SEQ ID NO: 37965 - protein, 10 aa, Artificial Sequence
  Peptide Derived from Human Papillomavirus
YAACHKCIDF

SEQ ID NO: 37966 - protein, 11 aa, Artificial Sequence
  Peptide Derived from Human Papillomavirus
YAACHKCIDFY

SEQ ID NO: 37967 - protein, 8 aa, Artificial Sequence
  Peptide Derived from Human Papillomavirus
YCKATLER

SEQ ID NO: 37968 - protein, 8 aa, Artificial Sequence
  Peptide Derived from Human Papillomavirus
YSRIRELR

SEQ ID NO: 37969 - protein, 9 aa, Artificial Sequence
  Peptide Derived from Human Papillomavirus
YSRIRELRY

SEQ ID NO: 37970 - protein, 10 aa, Artificial Sequence
  Peptide Derived from Human Papillomavirus
YSRIRELRYY

SEQ ID NO: 37971 - protein, 11 aa, Artificial Sequence
  Peptide Derived from Human Papillomavirus
ADDLRTLQQLF

SEQ ID NO: 37972 - protein, 11 aa, Artificial Sequence
  Peptide Derived from Human Papillomavirus
ADGVSHAQLPA

SEQ ID NO: 37973 - protein, 9 aa, Artificial Sequence
  Peptide Derived from Human Papillomavirus
ATLQEIVLH

SEQ ID NO: 37974 - protein, 9 aa, Artificial Sequence
  Peptide Derived from Human Papillomavirus
CVCCKCDGR

SEQ ID NO: 37975 - protein, 10 aa, Artificial Sequence
  Peptide Derived from Human Papillomavirus
DDLRTLQQLF

SEQ ID NO: 37976 - protein, 10 aa, Artificial Sequence
  Peptide Derived from Human Papillomavirus
DGVSHAQLPA

SEQ ID NO: 37977 - protein, 11 aa, Artificial Sequence
  Peptide Derived from Human Papillomavirus
DGVSHAQLPAR

SEQ ID NO: 37978 - protein, 9 aa, Artificial Sequence
  Peptide Derived from Human Papillomavirus
DLRTLQQLF

SEQ ID NO: 37979 - protein, 8 aa, Artificial Sequence
  Peptide Derived from Human Papillomavirus
EADGVSHA

SEQ ID NO: 37980 - protein, 10 aa, Artificial Sequence
  Peptide Derived from Human Papillomavirus
ELDPVDLLCY

SEQ ID NO: 37981 - protein, 8 aa, Artificial Sequence
  Peptide Derived from Human Papillomavirus
ELTVESSA

SEQ ID NO: 37982 - protein, 9 aa, Artificial Sequence
  Peptide Derived from Human Papillomavirus
ESEEENDEA

SEQ ID NO: 37983 - protein, 8 aa, Artificial Sequence
  Peptide Derived from Human Papillomavirus
ESSADDLR

SEQ ID NO: 37984 - protein, 9 aa, Artificial Sequence
  Peptide Derived from Human Papillomavirus
GVSHAQLPA

SEQ ID NO: 37985 - protein, 10 aa, Artificial Sequence
  Peptide Derived from Human Papillomavirus
GVSHAQLPAR

SEQ ID NO: 37986 - protein, 11 aa, Artificial Sequence
  Peptide Derived from Human Papillomavirus
GVSHAQLPARR

SEQ ID NO: 37987 - protein, 8 aa, Artificial Sequence
  Peptide Derived from Human Papillomavirus
HAQLPARR

SEQ ID NO: 37988 - protein, 9 aa, Artificial Sequence
  Peptide Derived from Human Papillomavirus
HAQLPARRA

SEQ ID NO: 37989 - protein, 11 aa, Artificial Sequence
  Peptide Derived from Human Papillomavirus
ILCVCCKCDGR

SEQ ID NO: 37990 - protein, 8 aa, Artificial Sequence
  Peptide Derived from Human Papillomavirus
KILCVCCK

SEQ ID NO: 37991 - protein, 10 aa, Artificial Sequence
  Peptide Derived from Human Papillomavirus
LCVCCKCDGR

SEQ ID NO: 37992 - protein, 9 aa, Artificial Sequence
  Peptide Derived from Human Papillomavirus
LDPVDLLCY

SEQ ID NO: 37993 - protein, 8 aa, Artificial Sequence
  Peptide Derived from Human Papillomavirus
LFLSTLSF

SEQ ID NO: 37994 - protein, 11 aa, Artificial Sequence
  Peptide Derived from Human Papillomavirus
LSESEEENDEA

SEQ ID NO: 37995 - protein, 9 aa, Artificial Sequence
  Peptide Derived from Human Papillomavirus
LSFVCPWCA

SEQ ID NO: 37996 - protein, 11 aa, Artificial Sequence
  Peptide Derived from Human Papillomavirus
LTVESSADDLR

SEQ ID NO: 37997 - protein, 9 aa, Artificial Sequence
  Peptide Derived from Human Papillomavirus
NDEADGVSH

SEQ ID NO: 37998 - protein, 10 aa, Artificial Sequence
  Peptide Derived from Human Papillomavirus
NDEADGVSHA

SEQ ID NO: 37999 - protein, 9 aa, Artificial Sequence
  Peptide Derived from Human Papillomavirus
PARRAEPQR

SEQ ID NO: 38000 - protein, 10 aa, Artificial Sequence
  Peptide Derived from Human Papillomavirus
PARRAEPQRH

SEQ ID NO: 38001 - protein, 11 aa, Artificial Sequence
  Peptide Derived from Human Papillomavirus
PARRAEPQRHK

SEQ ID NO: 38002 - protein, 9 aa, Artificial Sequence
  Peptide Derived from Human Papillomavirus
QLFLSTLSF

SEQ ID NO: 38003 - protein, 11 aa, Artificial Sequence
  Peptide Derived from Human Papillomavirus
QLPARRAEPQR

SEQ ID NO: 38004 - protein, 8 aa, Artificial Sequence
  Peptide Derived from Human Papillomavirus
RAEPQRHK

SEQ ID NO: 38005 - protein, 10 aa, Artificial Sequence
  Peptide Derived from Human Papillomavirus
RATLQEIVLH

SEQ ID NO: 38006 - protein, 10 aa, Artificial Sequence
  Peptide Derived from Human Papillomavirus
RIELTVESSA

SEQ ID NO: 38007 - protein, 8 aa, Artificial Sequence
  Peptide Derived from Human Papillomavirus
SFVCPWCA

SEQ ID NO: 38008 - protein, 11 aa, Artificial Sequence
  Peptide Derived from Human Papillomavirus
STLSFVCPWCA

SEQ ID NO: 38009 - protein, 8 aa, Artificial Sequence
  Peptide Derived from Human Papillomavirus
TLQEIVLH

SEQ ID NO: 38010 - protein, 10 aa, Artificial Sequence
  Peptide Derived from Human Papillomavirus
TLSFVCPWCA

SEQ ID NO: 38011 - protein, 10 aa, Artificial Sequence
  Peptide Derived from Human Papillomavirus
TVESSADDLR

SEQ ID NO: 38012 - protein, 8 aa, Artificial Sequence
  Peptide Derived from Human Papillomavirus
VCCKCDGR

SEQ ID NO: 38013 - protein, 8 aa, Artificial Sequence
  Peptide Derived from Human Papillomavirus
VSHAQLPA

SEQ ID NO: 38014 - protein, 9 aa, Artificial Sequence
  Peptide Derived from Human Papillomavirus
VSHAQLPAR

SEQ ID NO: 38015 - protein, 10 aa, Artificial Sequence
  Peptide Derived from Human Papillomavirus
VSHAQLPARR

SEQ ID NO: 38016 - protein, 11 aa, Artificial Sequence
  Peptide Derived from Human Papillomavirus
VSHAQLPARRA

SEQ ID NO: 38017 - protein, 9 aa, Artificial Sequence
  Peptide Derived from Human Papillomavirus
AASTSTASR

SEQ ID NO: 38018 - protein, 11 aa, Artificial Sequence
  Peptide Derived from Human Papillomavirus
AASTSTASRPA

SEQ ID NO: 38019 - protein, 11 aa, Artificial Sequence
  Peptide Derived from Human Papillomavirus
AATAVITQDVR

SEQ ID NO: 38020 - protein, 9 aa, Artificial Sequence
  Peptide Derived from Human Papillomavirus
ACVGMEIGR

SEQ ID NO: 38021 - protein, 9 aa, Artificial Sequence
  Peptide Derived from Human Papillomavirus
ADPYGDSMF

SEQ ID NO: 38022 - protein, 10 aa, Artificial Sequence
  Peptide Derived from Human Papillomavirus
ADPYGDSMFF

SEQ ID NO: 38023 - protein, 9 aa, Artificial Sequence
  Peptide Derived from Human Papillomavirus
AGNKQAVPK

SEQ ID NO: 38024 - protein, 8 aa, Artificial Sequence
  Peptide Derived from Human Papillomavirus
AIGEHWAK

SEQ ID NO: 38025 - protein, 8 aa, Artificial Sequence
  Peptide Derived from Human Papillomavirus
ALPDPNKF

SEQ ID NO: 38026 - protein, 11 aa, Artificial Sequence
  Peptide Derived from Human Papillomavirus
ALWRPSDSTVY

SEQ ID NO: 38027 - protein, 11 aa, Artificial Sequence
  Peptide Derived from Human Papillomavirus
AMDFSTLQDTK

SEQ ID NO: 38028 - protein, 9 aa, Artificial Sequence
  Peptide Derived from Human Papillomavirus
ASRPAKRVR

SEQ ID NO: 38029 - protein, 11 aa, Artificial Sequence
  Peptide Derived from Human Papillomavirus
ASRPAKRVRIR

SEQ ID NO: 38030 - protein, 11 aa, Artificial Sequence
  Peptide Derived from Human Papillomavirus
ASTQNPVPNTY

SEQ ID NO: 38031 - protein, 8 aa, Artificial Sequence
  Peptide Derived from Human Papillomavirus
ASTSTASR

SEQ ID NO: 38032 - protein, 10 aa, Artificial Sequence
  Peptide Derived from Human Papillomavirus
ASTSTASRPA

SEQ ID NO: 38033 - protein, 11 aa, Artificial Sequence
  Peptide Derived from Human Papillomavirus
ASTSTASRPAK

SEQ ID NO: 38034 - protein, 10 aa, Artificial Sequence
  Peptide Derived from Human Papillomavirus
ATAVITQDVR

SEQ ID NO: 38035 - protein, 8 aa, Artificial Sequence
  Peptide Derived from Human Papillomavirus
AVITQDVR

SEQ ID NO: 38036 - protein, 8 aa, Artificial Sequence
  Peptide Derived from Human Papillomavirus
AVPKVSAY

SEQ ID NO: 38037 - protein, 10 aa, Artificial Sequence
  Peptide Derived from Human Papillomavirus
AVPKVSAYQY

SEQ ID NO: 38038 - protein, 11 aa, Artificial Sequence
  Peptide Derived from Human Papillomavirus
AVPKVSAYQYR

SEQ ID NO: 38039 - protein, 8 aa, Artificial Sequence
  Peptide Derived from Human Papillomavirus
CILGCVPA

SEQ ID NO: 38040 - protein, 8 aa, Artificial Sequence
  Peptide Derived from Human Papillomavirus
CLRREQLF

SEQ ID NO: 38041 - protein, 9 aa, Artificial Sequence
  Peptide Derived from Human Papillomavirus
CLRREQLFA

SEQ ID NO: 38042 - protein, 10 aa, Artificial Sequence
  Peptide Derived from Human Papillomavirus
CLRREQLFAR

SEQ ID NO: 38043 - protein, 11 aa, Artificial Sequence
  Peptide Derived from Human Papillomavirus
CLRREQLFARH

SEQ ID NO: 38044 - protein, 8 aa, Artificial Sequence
  Peptide Derived from Human Papillomavirus
CVGMEIGR

SEQ ID NO: 38045 - protein, 8 aa, Artificial Sequence
  Peptide Derived from Human Papillomavirus
CVPAIGEH

SEQ ID NO: 38046 - protein, 10 aa, Artificial Sequence
  Peptide Derived from Human Papillomavirus
CVPAIGEHWA

SEQ ID NO: 38047 - protein, 11 aa, Artificial Sequence
  Peptide Derived from Human Papillomavirus
CVPAIGEHWAK

SEQ ID NO: 38048 - protein, 8 aa, Artificial Sequence
  Peptide Derived from Human Papillomavirus
DCPPLELK

SEQ ID NO: 38049 - protein, 8 aa, Artificial Sequence
  Peptide Derived from Human Papillomavirus
DDTESAHA

SEQ ID NO: 38050 - protein, 9 aa, Artificial Sequence
  Peptide Derived from Human Papillomavirus
DDTESAHAA

SEQ ID NO: 38051 - protein, 11 aa, Artificial Sequence
  Peptide Derived from Human Papillomavirus
DDTESAHAATA

SEQ ID NO: 38052 - protein, 10 aa, Artificial Sequence
  Peptide Derived from Human Papillomavirus
DDYVSRTSIF

SEQ ID NO: 38053 - protein, 11 aa, Artificial Sequence
  Peptide Derived from Human Papillomavirus
DDYVSRTSIFY

SEQ ID NO: 38054 - protein, 9 aa, Artificial Sequence
  Peptide Derived from Human Papillomavirus
DFSTLQDTK

SEQ ID NO: 38055 - protein, 9 aa, Artificial Sequence
  Peptide Derived from Human Papillomavirus
DGDMVDTGY

SEQ ID NO: 38056 - protein, 11 aa, Artificial Sequence
  Peptide Derived from Human Papillomavirus
DGDMVDTGYGA

SEQ ID NO: 38057 - protein, 8 aa, Artificial Sequence
  Peptide Derived from Human Papillomavirus
DICQSICK

SEQ ID NO: 38058 - protein, 9 aa, Artificial Sequence
  Peptide Derived from Human Papillomavirus
DICQSICKY

SEQ ID NO: 38059 - protein, 9 aa, Artificial Sequence
  Peptide Derived from Human Papillomavirus
DLDQYPLGR

SEQ ID NO: 38060 - protein, 10 aa, Artificial Sequence
  Peptide Derived from Human Papillomavirus
DLDQYPLGRK

SEQ ID NO: 38061 - protein, 11 aa, Artificial Sequence
  Peptide Derived from Human Papillomavirus
DLDQYPLGRKF

SEQ ID NO: 38062 - protein, 9 aa, Artificial Sequence
  Peptide Derived from Human Papillomavirus
DLYIKGTSA

SEQ ID NO: 38063 - protein, 9 aa, Artificial Sequence
  Peptide Derived from Human Papillomavirus
DMVDTGYGA

SEQ ID NO: 38064 - protein, 8 aa, Artificial Sequence
  Peptide Derived from Human Papillomavirus
DSMFFCLR

SEQ ID NO: 38065 - protein, 9 aa, Artificial Sequence
  Peptide Derived from Human Papillomavirus
DSMFFCLRR

SEQ ID NO: 38066 - protein, 9 aa, Artificial Sequence
  Peptide Derived from Human Papillomavirus
DSQLFNKPY

SEQ ID NO: 38067 - protein, 11 aa, Artificial Sequence
  Peptide Derived from Human Papillomavirus
DSTIYNPETQR

SEQ ID NO: 38068 - protein, 8 aa, Artificial Sequence
  Peptide Derived from Human Papillomavirus
DTESAHAA

SEQ ID NO: 38069 - protein, 10 aa, Artificial Sequence
  Peptide Derived from Human Papillomavirus
DTESAHAATA

SEQ ID NO: 38070 - protein, 9 aa, Artificial Sequence
  Peptide Derived from Human Papillomavirus
DTGYGAMDF

SEQ ID NO: 38071 - protein, 11 aa, Artificial Sequence
  Peptide Derived from Human Papillomavirus
DTTPPEKQDPY

SEQ ID NO: 38072 - protein, 8 aa, Artificial Sequence
  Peptide Derived from Human Papillomavirus
DTVPTDLY

SEQ ID NO: 38073 - protein, 10 aa, Artificial Sequence
  Peptide Derived from Human Papillomavirus
DTVPTDLYIK

SEQ ID NO: 38074 - protein, 10 aa, Artificial Sequence
  Peptide Derived from Human Papillomavirus
DTYRFVQSVA

SEQ ID NO: 38075 - protein, 10 aa, Artificial Sequence
  Peptide Derived from Human Papillomavirus
DVRDNVSVDY

SEQ ID NO: 38076 - protein, 11 aa, Artificial Sequence
  Peptide Derived from Human Papillomavirus
DVRDNVSVDYK

SEQ ID NO: 38077 - protein, 10 aa, Artificial Sequence
  Peptide Derived from Human Papillomavirus
EDGDMVDTGY

SEQ ID NO: 38078 - protein, 8 aa, Artificial Sequence
  Peptide Derived from Human Papillomavirus
ESAHAATA

SEQ ID NO: 38079 - protein, 8 aa, Artificial Sequence
  Peptide Derived from Human Papillomavirus
ETPGSCVY

SEQ ID NO: 38080 - protein, 8 aa, Artificial Sequence
  Peptide Derived from Human Papillomavirus
ETQRLVWA

SEQ ID NO: 38081 - protein, 8 aa, Artificial Sequence
  Peptide Derived from Human Papillomavirus
FARHFWNR

SEQ ID NO: 38082 - protein, 9 aa, Artificial Sequence
  Peptide Derived from Human Papillomavirus
FARHFWNRA

SEQ ID NO: 38083 - protein, 9 aa, Artificial Sequence
  Peptide Derived from Human Papillomavirus
FCLRREQLF

SEQ ID NO: 38084 - protein, 10 aa, Artificial Sequence
  Peptide Derived from Human Papillomavirus
FCLRREQLFA

SEQ ID NO: 38085 - protein, 11 aa, Artificial Sequence
  Peptide Derived from Human Papillomavirus
FCLRREQLFAR

SEQ ID NO: 38086 - protein, 10 aa, Artificial Sequence
  Peptide Derived from Human Papillomavirus
FFCLRREQLF

SEQ ID NO: 38087 - protein, 11 aa, Artificial Sequence
  Peptide Derived from Human Papillomavirus
FFCLRREQLFA

SEQ ID NO: 38088 - protein, 9 aa, Artificial Sequence
  Peptide Derived from Human Papillomavirus
FGLPDSTIY

SEQ ID NO: 38089 - protein, 8 aa, Artificial Sequence
  Peptide Derived from Human Papillomavirus
FLKNVNVF

SEQ ID NO: 38090 - protein, 11 aa, Artificial Sequence
  Peptide Derived from Human Papillomavirus
FLKNVNVFPIF

SEQ ID NO: 38091 - protein, 8 aa, Artificial Sequence
  Peptide Derived from Human Papillomavirus
FLQMALWR

SEQ ID NO: 38092 - protein, 8 aa, Artificial Sequence
  Peptide Derived from Human Papillomavirus
FLVQAGLR

SEQ ID NO: 38093 - protein, 9 aa, Artificial Sequence
  Peptide Derived from Human Papillomavirus
FLVQAGLRR

SEQ ID NO: 38094 - protein, 10 aa, Artificial Sequence
  Peptide Derived from Human Papillomavirus
FLVQAGLRRR

SEQ ID NO: 38095 - protein, 8 aa, Artificial Sequence
  Peptide Derived from Human Papillomavirus
FSSDLDQY

SEQ ID NO: 38096 - protein, 8 aa, Artificial Sequence
  Peptide Derived from Human Papillomavirus
FSTLQDTK

SEQ ID NO: 38097 - protein, 11 aa, Artificial Sequence
  Peptide Derived from Human Papillomavirus
FVQSVAVTCQK

SEQ ID NO: 38098 - protein, 9 aa, Artificial Sequence
  Peptide Derived from Human Papillomavirus
FVTVVDTTR

SEQ ID NO: 38099 - protein, 10 aa, Artificial Sequence
  Peptide Derived from Human Papillomavirus
GAGNKQAVPK

SEQ ID NO: 38100 - protein, 9 aa, Artificial Sequence
  Peptide Derived from Human Papillomavirus
GCVPAIGEH

SEQ ID NO: 38101 - protein, 11 aa, Artificial Sequence
  Peptide Derived from Human Papillomavirus
GCVPAIGEHWA

SEQ ID NO: 38102 - protein, 9 aa, Artificial Sequence
  Peptide Derived from Human Papillomavirus
GDCPPLELK

SEQ ID NO: 38103 - protein, 8 aa, Artificial Sequence
  Peptide Derived from Human Papillomavirus
GDMVDTGY

SEQ ID NO: 38104 - protein, 10 aa, Artificial Sequence
  Peptide Derived from Human Papillomavirus
GDMVDTGYGA

SEQ ID NO: 38105 - protein, 9 aa, Artificial Sequence
  Peptide Derived from Human Papillomavirus
GDSMFFCLR

SEQ ID NO: 38106 - protein, 10 aa, Artificial Sequence
  Peptide Derived from Human Papillomavirus
GDSMFFCLRR

SEQ ID NO: 38107 - protein, 9 aa, Artificial Sequence
  Peptide Derived from Human Papillomavirus
GDTVPTDLY

SEQ ID NO: 38108 - protein, 11 aa, Artificial Sequence
  Peptide Derived from Human Papillomavirus
GDTVPTDLYIK

SEQ ID NO: 38109 - protein, 9 aa, Artificial Sequence
  Peptide Derived from Human Papillomavirus
GICWHNQLF

SEQ ID NO: 38110 - protein, 9 aa, Artificial Sequence
  Peptide Derived from Human Papillomavirus
GIGLSGHPF

SEQ ID NO: 38111 - protein, 10 aa, Artificial Sequence
  Peptide Derived from Human Papillomavirus
GIGLSGHPFY

SEQ ID NO: 38112 - protein, 8 aa, Artificial Sequence
  Peptide Derived from Human Papillomavirus
GLPDSTIY

SEQ ID NO: 38113 - protein, 11 aa, Artificial Sequence
  Peptide Derived from Human Papillomavirus
GLRRRPTIGPR

SEQ ID NO: 38114 - protein, 8 aa, Artificial Sequence
  Peptide Derived from Human Papillomavirus
GLSGHPFY

SEQ ID NO: 38115 - protein, 10 aa, Artificial Sequence
  Peptide Derived from Human Papillomavirus
GLSGHPFYNK

SEQ ID NO: 38116 - protein, 11 aa, Artificial Sequence
  Peptide Derived from Human Papillomavirus
GSITTSDSQLF

SEQ ID NO: 38117 - protein, 8 aa, Artificial Sequence
  Peptide Derived from Human Papillomavirus
HGIIIFLK

SEQ ID NO: 38118 - protein, 9 aa, Artificial Sequence
  Peptide Derived from Human Papillomavirus
HVEEYDLQF

SEQ ID NO: 38119 - protein, 11 aa, Artificial Sequence
  Peptide Derived from Human Papillomavirus
HVEEYDLQFIF

SEQ ID NO: 38120 - protein, 8 aa, Artificial Sequence
  Peptide Derived from Human Papillomavirus
ICQSICKY

SEQ ID NO: 38121 - protein, 11 aa, Artificial Sequence
  Peptide Derived from Human Papillomavirus
ICQSICKYPDY

SEQ ID NO: 38122 - protein, 8 aa, Artificial Sequence
  Peptide Derived from Human Papillomavirus
ICWHNQLF

SEQ ID NO: 38123 - protein, 9 aa, Artificial Sequence
  Peptide Derived from Human Papillomavirus
IFLKNVNVF

SEQ ID NO: 38124 - protein, 9 aa, Artificial Sequence
  Peptide Derived from Human Papillomavirus
IFLQMALWR

SEQ ID NO: 38125 - protein, 11 aa, Artificial Sequence
  Peptide Derived from Human Papillomavirus
IFQLCTITLTA

SEQ ID NO: 38126 - protein, 9 aa, Artificial Sequence
  Peptide Derived from Human Papillomavirus
IFYHAGSSR

SEQ ID NO: 38127 - protein, 8 aa, Artificial Sequence
  Peptide Derived from Human Papillomavirus
IGLSGHPF

SEQ ID NO: 38128 - protein, 9 aa, Artificial Sequence
  Peptide Derived from Human Papillomavirus
IGLSGHPFY

SEQ ID NO: 38129 - protein, 11 aa, Artificial Sequence
  Peptide Derived from Human Papillomavirus
IGLSGHPFYNK

SEQ ID NO: 38130 - protein, 8 aa, Artificial Sequence
  Peptide Derived from Human Papillomavirus
IGPRKRPA

SEQ ID NO: 38131 - protein, 9 aa, Artificial Sequence
  Peptide Derived from Human Papillomavirus
IGPRKRPAA

SEQ ID NO: 38132 - protein, 10 aa, Artificial Sequence
  Peptide Derived from Human Papillomavirus
IIFLKNVNVF

SEQ ID NO: 38133 - protein, 11 aa, Artificial Sequence
  Peptide Derived from Human Papillomavirus
IIIFLKNVNVF

SEQ ID NO: 38134 - protein, 10 aa, Artificial Sequence
  Peptide Derived from Human Papillomavirus
IIYGHGIIIF

SEQ ID NO: 38135 - protein, 11 aa, Artificial Sequence
  Peptide Derived from Human Papillomavirus
ILGCVPAIGEH

SEQ ID NO: 38136 - protein, 10 aa, Artificial Sequence
  Peptide Derived from Human Papillomavirus
ITLTAEVMSY

SEQ ID NO: 38137 - protein, 9 aa, Artificial Sequence
  Peptide Derived from Human Papillomavirus
ITTSDSQLF

SEQ ID NO: 38138 - protein, 11 aa, Artificial Sequence
  Peptide Derived from Human Papillomavirus
ITTSDSQLFNK

SEQ ID NO: 38139 - protein, 8 aa, Artificial Sequence
  Peptide Derived from Human Papillomavirus
KDTTPPEK

SEQ ID NO: 38140 - protein, 10 aa, Artificial Sequence
  Peptide Derived from Human Papillomavirus
KFGLPDSTIY

SEQ ID NO: 38141 - protein, 8 aa, Artificial Sequence
  Peptide Derived from Human Papillomavirus
KFKHYSRH

SEQ ID NO: 38142 - protein, 9 aa, Artificial Sequence
  Peptide Derived from Human Papillomavirus
KFLVQAGLR

SEQ ID NO: 38143 - protein, 10 aa, Artificial Sequence
  Peptide Derived from Human Papillomavirus
KFLVQAGLRR

SEQ ID NO: 38144 - protein, 11 aa, Artificial Sequence
  Peptide Derived from Human Papillomavirus
KFLVQAGLRRR

SEQ ID NO: 38145 - protein, 9 aa, Artificial Sequence
  Peptide Derived from Human Papillomavirus
KFSSDLDQY

SEQ ID NO: 38146 - protein, 8 aa, Artificial Sequence
  Peptide Derived from Human Papillomavirus
KFWTVDLK

SEQ ID NO: 38147 - protein, 10 aa, Artificial Sequence
  Peptide Derived from Human Papillomavirus
KFWTVDLKEK

SEQ ID NO: 38148 - protein, 11 aa, Artificial Sequence
  Peptide Derived from Human Papillomavirus
KFWTVDLKEKF

SEQ ID NO: 38149 - protein, 8 aa, Artificial Sequence
  Peptide Derived from Human Papillomavirus
KGTLCKPA

SEQ ID NO: 38150 - protein, 8 aa, Artificial Sequence
  Peptide Derived from Human Papillomavirus
KGTSANMR

SEQ ID NO: 38151 - protein, 8 aa, Artificial Sequence
  Peptide Derived from Human Papillomavirus
KLDDTESA

SEQ ID NO: 38152 - protein, 9 aa, Artificial Sequence
  Peptide Derived from Human Papillomavirus
KLDDTESAH

SEQ ID NO: 38153 - protein, 10 aa, Artificial Sequence
  Peptide Derived from Human Papillomavirus
KLDDTESAHA

SEQ ID NO: 38154 - protein, 11 aa, Artificial Sequence
  Peptide Derived from Human Papillomavirus
KLDDTESAHAA

SEQ ID NO: 38155 - protein, 10 aa, Artificial Sequence
  Peptide Derived from Human Papillomavirus
KLKFWTVDLK

SEQ ID NO: 38156 - protein, 8 aa, Artificial Sequence
  Peptide Derived from Human Papillomavirus
KVSAYQYR

SEQ ID NO: 38157 - protein, 10 aa, Artificial Sequence
  Peptide Derived from Human Papillomavirus
KVSAYQYRVF

SEQ ID NO: 38158 - protein, 11 aa, Artificial Sequence
  Peptide Derived from Human Papillomavirus
KVSAYQYRVFR

SEQ ID NO: 38159 - protein, 9 aa, Artificial Sequence
  Peptide Derived from Human Papillomavirus
LCILGCVPA

SEQ ID NO: 38160 - protein, 8 aa, Artificial Sequence
  Peptide Derived from Human Papillomavirus
LCTITLTA

SEQ ID NO: 38161 - protein, 8 aa, Artificial Sequence
  Peptide Derived from Human Papillomavirus
LDDTESAH

SEQ ID NO: 38162 - protein, 9 aa, Artificial Sequence
  Peptide Derived from Human Papillomavirus
LDDTESAHA

SEQ ID NO: 38163 - protein, 10 aa, Artificial Sequence
  Peptide Derived from Human Papillomavirus
LDDTESAHAA

SEQ ID NO: 38164 - protein, 9 aa, Artificial Sequence
  Peptide Derived from Human Papillomavirus
LDICQSICK

SEQ ID NO: 38165 - protein, 10 aa, Artificial Sequence
  Peptide Derived from Human Papillomavirus
LDICQSICKY

SEQ ID NO: 38166 - protein, 8 aa, Artificial Sequence
  Peptide Derived from Human Papillomavirus
LDQYPLGR

SEQ ID NO: 38167 - protein, 9 aa, Artificial Sequence
  Peptide Derived from Human Papillomavirus
LDQYPLGRK

SEQ ID NO: 38168 - protein, 10 aa, Artificial Sequence
  Peptide Derived from Human Papillomavirus
LDQYPLGRKF

SEQ ID NO: 38169 - protein, 9 aa, Artificial Sequence
  Peptide Derived from Human Papillomavirus
LFARHFWNR

SEQ ID NO: 38170 - protein, 10 aa, Artificial Sequence
  Peptide Derived from Human Papillomavirus
LFARHFWNRA

SEQ ID NO: 38171 - protein, 9 aa, Artificial Sequence
  Peptide Derived from Human Papillomavirus
LFNKPYWLH

SEQ ID NO: 38172 - protein, 10 aa, Artificial Sequence
  Peptide Derived from Human Papillomavirus
LFNKPYWLHK

SEQ ID NO: 38173 - protein, 11 aa, Artificial Sequence
  Peptide Derived from Human Papillomavirus
LFNKPYWLHKA

SEQ ID NO: 38174 - protein, 10 aa, Artificial Sequence
  Peptide Derived from Human Papillomavirus
LFVTVVDTTR

SEQ ID NO: 38175 - protein, 10 aa, Artificial Sequence
  Peptide Derived from Human Papillomavirus
LGCVPAIGEH

SEQ ID NO: 38176 - protein, 8 aa, Artificial Sequence
  Peptide Derived from Human Papillomavirus
LGIGLSGH

SEQ ID NO: 38177 - protein, 10 aa, Artificial Sequence
  Peptide Derived from Human Papillomavirus
LGIGLSGHPF

SEQ ID NO: 38178 - protein, 11 aa, Artificial Sequence
  Peptide Derived from Human Papillomavirus
LGIGLSGHPFY

SEQ ID NO: 38179 - protein, 9 aa, Artificial Sequence
  Peptide Derived from Human Papillomavirus
LGRKFLVQA

SEQ ID NO: 38180 - protein, 8 aa, Artificial Sequence
  Peptide Derived from Human Papillomavirus
LLTVGNPY

SEQ ID NO: 38181 - protein, 9 aa, Artificial Sequence
  Peptide Derived from Human Papillomavirus
LLTVGNPYF

SEQ ID NO: 38182 - protein, 10 aa, Artificial Sequence
  Peptide Derived from Human Papillomavirus
LLTVGNPYFR

SEQ ID NO: 38183 - protein, 9 aa, Artificial Sequence
  Peptide Derived from Human Papillomavirus
LSGHPFYNK

SEQ ID NO: 38184 - protein, 8 aa, Artificial Sequence
  Peptide Derived from Human Papillomavirus
LTAEVMSY

SEQ ID NO: 38185 - protein, 10 aa, Artificial Sequence
  Peptide Derived from Human Papillomavirus
LTAEVMSYIH

SEQ ID NO: 38186 - protein, 8 aa, Artificial Sequence
  Peptide Derived from Human Papillomavirus
LTVGNPYF

SEQ ID NO: 38187 - protein, 9 aa, Artificial Sequence
  Peptide Derived from Human Papillomavirus
LTVGNPYFR

SEQ ID NO: 38188 - protein, 8 aa, Artificial Sequence
  Peptide Derived from Human Papillomavirus
LVQAGLRR

SEQ ID NO: 38189 - protein, 9 aa, Artificial Sequence
  Peptide Derived from Human Papillomavirus
LVQAGLRRR

SEQ ID NO: 38190 - protein, 9 aa, Artificial Sequence
  Peptide Derived from Human Papillomavirus
MAHNIIYGH

SEQ ID NO: 38191 - protein, 10 aa, Artificial Sequence
  Peptide Derived from Human Papillomavirus
MDFSTLQDTK

SEQ ID NO: 38192 - protein, 11 aa, Artificial Sequence
  Peptide Derived from Human Papillomavirus
MFFCLRREQLF

SEQ ID NO: 38193 - protein, 10 aa, Artificial Sequence
  Peptide Derived from Human Papillomavirus
MGDTVPTDLY

SEQ ID NO: 38194 - protein, 11 aa, Artificial Sequence
  Peptide Derived from Human Papillomavirus
MSADPYGDSMF

SEQ ID NO: 38195 - protein, 8 aa, Artificial Sequence
  Peptide Derived from Human Papillomavirus
MVDTGYGA

SEQ ID NO: 38196 - protein, 11 aa, Artificial Sequence
  Peptide Derived from Human Papillomavirus
MVDTGYGAMDF

SEQ ID NO: 38197 - protein, 10 aa, Artificial Sequence
  Peptide Derived from Human Papillomavirus
NGICWHNQLF

SEQ ID NO: 38198 - protein, 11 aa, Artificial Sequence
  Peptide Derived from Human Papillomavirus
NIIYGHGIIIF

SEQ ID NO: 38199 - protein, 11 aa, Artificial Sequence
  Peptide Derived from Human Papillomavirus
NMRETPGSCVY

SEQ ID NO: 38200 - protein, 10 aa, Artificial Sequence
  Peptide Derived from Human Papillomavirus
NSSILENWNF

SEQ ID NO: 38201 - protein, 8 aa, Artificial Sequence
  Peptide Derived from Human Papillomavirus
NTDDYVSR

SEQ ID NO: 38202 - protein, 8 aa, Artificial Sequence
  Peptide Derived from Human Papillomavirus
NTYDPTKF

SEQ ID NO: 38203 - protein, 9 aa, Artificial Sequence
  Peptide Derived from Human Papillomavirus
NTYDPTKFK

SEQ ID NO: 38204 - protein, 10 aa, Artificial Sequence
  Peptide Derived from Human Papillomavirus
NTYDPTKFKH

SEQ ID NO: 38205 - protein, 11 aa, Artificial Sequence
  Peptide Derived from Human Papillomavirus
NTYDPTKFKHY

SEQ ID NO: 38206 - protein, 10 aa, Artificial Sequence
  Peptide Derived from Human Papillomavirus
NVFPIFLQMA

SEQ ID NO: 38207 - protein, 8 aa, Artificial Sequence
  Peptide Derived from Human Papillomavirus
NVNVFPIF

SEQ ID NO: 38208 - protein, 8 aa, Artificial Sequence
  Peptide Derived from Human Papillomavirus
PAASTSTA

SEQ ID NO: 38209 - protein, 10 aa, Artificial Sequence
  Peptide Derived from Human Papillomavirus
PAASTSTASR

SEQ ID NO: 38210 - protein, 8 aa, Artificial Sequence
  Peptide Derived from Human Papillomavirus
PAIGEHWA

SEQ ID NO: 38211 - protein, 9 aa, Artificial Sequence
  Peptide Derived from Human Papillomavirus
PAIGEHWAK

SEQ ID NO: 38212 - protein, 8 aa, Artificial Sequence
  Peptide Derived from Human Papillomavirus
PAKRVRIR

SEQ ID NO: 38213 - protein, 10 aa, Artificial Sequence
  Peptide Derived from Human Papillomavirus
PAKRVRIRSK

SEQ ID NO: 38214 - protein, 11 aa, Artificial Sequence
  Peptide Derived from Human Papillomavirus
PAKRVRIRSKK

SEQ ID NO: 38215 - protein, 8 aa, Artificial Sequence
  Peptide Derived from Human Papillomavirus
PDYLQMSA

SEQ ID NO: 38216 - protein, 11 aa, Artificial Sequence
  Peptide Derived from Human Papillomavirus
PDYLQMSADPY

SEQ ID NO: 38217 - protein, 10 aa, Artificial Sequence
  Peptide Derived from Human Papillomavirus
PGDCPPLELK

SEQ ID NO: 38218 - protein, 10 aa, Artificial Sequence
  Peptide Derived from Human Papillomavirus
PIFLQMALWR

SEQ ID NO: 38219 - protein, 10 aa, Artificial Sequence
  Peptide Derived from Human Papillomavirus
PLDICQSICK

SEQ ID NO: 38220 - protein, 11 aa, Artificial Sequence
  Peptide Derived from Human Papillomavirus
PLDICQSICKY

SEQ ID NO: 38221 - protein, 9 aa, Artificial Sequence
  Peptide Derived from Human Papillomavirus
PLGIGLSGH

SEQ ID NO: 38222 - protein, 11 aa, Artificial Sequence
  Peptide Derived from Human Papillomavirus
PLGIGLSGHPF

SEQ ID NO: 38223 - protein, 10 aa, Artificial Sequence
  Peptide Derived from Human Papillomavirus
PLGRKFLVQA

SEQ ID NO: 38224 - protein, 9 aa, Artificial Sequence
  Peptide Derived from Human Papillomavirus
PSGAGNKQA

SEQ ID NO: 38225 - protein, 11 aa, Artificial Sequence
  Peptide Derived from Human Papillomavirus
PTDLYIKGTSA

SEQ ID NO: 38226 - protein, 8 aa, Artificial Sequence
  Peptide Derived from Human Papillomavirus
PTIGPRKR

SEQ ID NO: 38227 - protein, 10 aa, Artificial Sequence
  Peptide Derived from Human Papillomavirus
PTIGPRKRPA

SEQ ID NO: 38228 - protein, 11 aa, Artificial Sequence
  Peptide Derived from Human Papillomavirus
PTIGPRKRPAA

SEQ ID NO: 38229 - protein, 9 aa, Artificial Sequence
  Peptide Derived from Human Papillomavirus
PTKFKHYSR

SEQ ID NO: 38230 - protein, 10 aa, Artificial Sequence
  Peptide Derived from Human Papillomavirus
PTKFKHYSRH

SEQ ID NO: 38231 - protein, 9 aa, Artificial Sequence
  Peptide Derived from Human Papillomavirus
PTTSLVDTY

SEQ ID NO: 38232 - protein, 10 aa, Artificial Sequence
  Peptide Derived from Human Papillomavirus
PTTSLVDTYR

SEQ ID NO: 38233 - protein, 11 aa, Artificial Sequence
  Peptide Derived from Human Papillomavirus
PTTSLVDTYRF

SEQ ID NO: 38234 - protein, 10 aa, Artificial Sequence
  Peptide Derived from Human Papillomavirus
PVPNTYDPTK

SEQ ID NO: 38235 - protein, 11 aa, Artificial Sequence
  Peptide Derived from Human Papillomavirus
PVPNTYDPTKF

SEQ ID NO: 38236 - protein, 8 aa, Artificial Sequence
  Peptide Derived from Human Papillomavirus
QAVPKVSA

SEQ ID NO: 38237 - protein, 9 aa, Artificial Sequence
  Peptide Derived from Human Papillomavirus
QAVPKVSAY

SEQ ID NO: 38238 - protein, 11 aa, Artificial Sequence
  Peptide Derived from Human Papillomavirus
QAVPKVSAYQY

SEQ ID NO: 38239 - protein, 8 aa, Artificial Sequence
  Peptide Derived from Human Papillomavirus
QDPYDKLK

SEQ ID NO: 38240 - protein, 9 aa, Artificial Sequence
  Peptide Derived from Human Papillomavirus
QDPYDKLKF

SEQ ID NO: 38241 - protein, 11 aa, Artificial Sequence
  Peptide Derived from Human Papillomavirus
QDVRDNVSVDY

SEQ ID NO: 38242 - protein, 10 aa, Artificial Sequence
  Peptide Derived from Human Papillomavirus
QGHNNGICWH

SEQ ID NO: 38243 - protein, 10 aa, Artificial Sequence
  Peptide Derived from Human Papillomavirus
QLCILGCVPA

SEQ ID NO: 38244 - protein, 9 aa, Artificial Sequence
  Peptide Derived from Human Papillomavirus
QLCTITLTA

SEQ ID NO: 38245 - protein, 10 aa, Artificial Sequence
  Peptide Derived from Human Papillomavirus
QLFARHFWNR

SEQ ID NO: 38246 - protein, 11 aa, Artificial Sequence
  Peptide Derived from Human Papillomavirus
QLFARHFWNRA

SEQ ID NO: 38247 - protein, 10 aa, Artificial Sequence
  Peptide Derived from Human Papillomavirus
QLFNKPYWLH

SEQ ID NO: 38248 - protein, 11 aa, Artificial Sequence
  Peptide Derived from Human Papillomavirus
QLFNKPYWLHK

SEQ ID NO: 38249 - protein, 11 aa, Artificial Sequence
  Peptide Derived from Human Papillomavirus
QLFVTVVDTTR

SEQ ID NO: 38250 - protein, 9 aa, Artificial Sequence
  Peptide Derived from Human Papillomavirus
QSICKYPDY

SEQ ID NO: 38251 - protein, 9 aa, Artificial Sequence
  Peptide Derived from Human Papillomavirus
QSVAVTCQK

SEQ ID NO: 38252 - protein, 8 aa, Artificial Sequence
  Peptide Derived from Human Papillomavirus
RDNVSVDY

SEQ ID NO: 38253 - protein, 9 aa, Artificial Sequence
  Peptide Derived from Human Papillomavirus
RDNVSVDYK

SEQ ID NO: 38254 - protein, 9 aa, Artificial Sequence
  Peptide Derived from Human Papillomavirus
RLLTVGNPY

SEQ ID NO: 38255 - protein, 10 aa, Artificial Sequence
  Peptide Derived from Human Papillomavirus
RLLTVGNPYF

SEQ ID NO: 38256 - protein, 11 aa, Artificial Sequence
  Peptide Derived from Human Papillomavirus
RLLTVGNPYFR

SEQ ID NO: 38257 - protein, 9 aa, Artificial Sequence
  Peptide Derived from Human Papillomavirus
RSTNLTLCA

SEQ ID NO: 38258 - protein, 8 aa, Artificial Sequence
  Peptide Derived from Human Papillomavirus
RTSIFYHA

SEQ ID NO: 38259 - protein, 9 aa, Artificial Sequence
  Peptide Derived from Human Papillomavirus
RVALPDPNK

SEQ ID NO: 38260 - protein, 10 aa, Artificial Sequence
  Peptide Derived from Human Papillomavirus
RVALPDPNKF

SEQ ID NO: 38261 - protein, 8 aa, Artificial Sequence
  Peptide Derived from Human Papillomavirus
RVRIRSKK

SEQ ID NO: 38262 - protein, 8 aa, Artificial Sequence
  Peptide Derived from Human Papillomavirus
RVVNTDDY

SEQ ID NO: 38263 - protein, 11 aa, Artificial Sequence
  Peptide Derived from Human Papillomavirus
RVVNTDDYVSR

SEQ ID NO: 38264 - protein, 10 aa, Artificial Sequence
  Peptide Derived from Human Papillomavirus
RVVPSGAGNK

SEQ ID NO: 38265 - protein, 10 aa, Artificial Sequence
  Peptide Derived from Human Papillomavirus
SADPYGDSMF

SEQ ID NO: 38266 - protein, 11 aa, Artificial Sequence
  Peptide Derived from Human Papillomavirus
SADPYGDSMFF

SEQ ID NO: 38267 - protein, 8 aa, Artificial Sequence
  Peptide Derived from Human Papillomavirus
SAYQYRVF

SEQ ID NO: 38268 - protein, 9 aa, Artificial Sequence
  Peptide Derived from Human Papillomavirus
SAYQYRVFR

SEQ ID NO: 38269 - protein, 11 aa, Artificial Sequence
  Peptide Derived from Human Papillomavirus
SAYQYRVFRVA

SEQ ID NO: 38270 - protein, 10 aa, Artificial Sequence
  Peptide Derived from Human Papillomavirus
SDLDQYPLGR

SEQ ID NO: 38271 - protein, 11 aa, Artificial Sequence
  Peptide Derived from Human Papillomavirus
SDLDQYPLGRK

SEQ ID NO: 38272 - protein, 8 aa, Artificial Sequence
  Peptide Derived from Human Papillomavirus
SDSQLFNK

SEQ ID NO: 38273 - protein, 10 aa, Artificial Sequence
  Peptide Derived from Human Papillomavirus
SDSQLFNKPY

SEQ ID NO: 38274 - protein, 8 aa, Artificial Sequence
  Peptide Derived from Human Papillomavirus
SGAGNKQA

SEQ ID NO: 38275 - protein, 11 aa, Artificial Sequence
  Peptide Derived from Human Papillomavirus
SGAGNKQAVPK

SEQ ID NO: 38276 - protein, 8 aa, Artificial Sequence
  Peptide Derived from Human Papillomavirus
SGHPFYNK

SEQ ID NO: 38277 - protein, 8 aa, Artificial Sequence
  Peptide Derived from Human Papillomavirus
SICKYPDY

SEQ ID NO: 38278 - protein, 10 aa, Artificial Sequence
  Peptide Derived from Human Papillomavirus
SIFYHAGSSR

SEQ ID NO: 38279 - protein, 8 aa, Artificial Sequence
  Peptide Derived from Human Papillomavirus
SILENWNF

SEQ ID NO: 38280 - protein, 10 aa, Artificial Sequence
  Peptide Derived from Human Papillomavirus
SITTSDSQLF

SEQ ID NO: 38281 - protein, 8 aa, Artificial Sequence
  Peptide Derived from Human Papillomavirus
SLVDTYRF

SEQ ID NO: 38282 - protein, 8 aa, Artificial Sequence
  Peptide Derived from Human Papillomavirus
SMFFCLRR

SEQ ID NO: 38283 - protein, 11 aa, Artificial Sequence
  Peptide Derived from Human Papillomavirus
SSDLDQYPLGR

SEQ ID NO: 38284 - protein, 9 aa, Artificial Sequence
  Peptide Derived from Human Papillomavirus
SSILENWNF

SEQ ID NO: 38285 - protein, 11 aa, Artificial Sequence
  Peptide Derived from Human Papillomavirus
SSRLLTVGNPY

SEQ ID NO: 38286 - protein, 8 aa, Artificial Sequence
  Peptide Derived from Human Papillomavirus
STASRPAK

SEQ ID NO: 38287 - protein, 9 aa, Artificial Sequence
  Peptide Derived from Human Papillomavirus
STASRPAKR

SEQ ID NO: 38288 - protein, 11 aa, Artificial Sequence
  Peptide Derived from Human Papillomavirus
STASRPAKRVR

SEQ ID NO: 38289 - protein, 10 aa, Artificial Sequence
  Peptide Derived from Human Papillomavirus
STIYNPETQR

SEQ ID NO: 38290 - protein, 8 aa, Artificial Sequence
  Peptide Derived from Human Papillomavirus
STNLTLCA

SEQ ID NO: 38291 - protein, 10 aa, Artificial Sequence
  Peptide Derived from Human Papillomavirus
STQNPVPNTY

SEQ ID NO: 38292 - protein, 9 aa, Artificial Sequence
  Peptide Derived from Human Papillomavirus
STSTASRPA

SEQ ID NO: 38293 - protein, 10 aa, Artificial Sequence
  Peptide Derived from Human Papillomavirus
STSTASRPAK

SEQ ID NO: 38294 - protein, 11 aa, Artificial Sequence
  Peptide Derived from Human Papillomavirus
STSTASRPAKR

SEQ ID NO: 38295 - protein, 11 aa, Artificial Sequence
  Peptide Derived from Human Papillomavirus
STVYLPPPSVA

SEQ ID NO: 38296 - protein, 11 aa, Artificial Sequence
  Peptide Derived from Human Papillomavirus
SVARVVNTDDY

SEQ ID NO: 38297 - protein, 8 aa, Artificial Sequence
  Peptide Derived from Human Papillomavirus
SVAVTCQK

SEQ ID NO: 38298 - protein, 9 aa, Artificial Sequence
  Peptide Derived from Human Papillomavirus
TAEVMSYIH

SEQ ID NO: 38299 - protein, 8 aa, Artificial Sequence
  Peptide Derived from Human Papillomavirus
TASRPAKR

SEQ ID NO: 38300 - protein, 10 aa, Artificial Sequence
  Peptide Derived from Human Papillomavirus
TASRPAKRVR

SEQ ID NO: 38301 - protein, 9 aa, Artificial Sequence
  Peptide Derived from Human Papillomavirus
TAVITQDVR

SEQ ID NO: 38302 - protein, 11 aa, Artificial Sequence
  Peptide Derived from Human Papillomavirus
TCQKDTTPPEK

SEQ ID NO: 38303 - protein, 11 aa, Artificial Sequence
  Peptide Derived from Human Papillomavirus
TDDYVSRTSIF

SEQ ID NO: 38304 - protein, 10 aa, Artificial Sequence
  Peptide Derived from Human Papillomavirus
TDLYIKGTSA

SEQ ID NO: 38305 - protein, 8 aa, Artificial Sequence
  Peptide Derived from Human Papillomavirus
TGYGAMDF

SEQ ID NO: 38306 - protein, 9 aa, Artificial Sequence
  Peptide Derived from Human Papillomavirus
TIGPRKRPA

SEQ ID NO: 38307 - protein, 10 aa, Artificial Sequence
  Peptide Derived from Human Papillomavirus
TIGPRKRPAA

SEQ ID NO: 38308 - protein, 11 aa, Artificial Sequence
  Peptide Derived from Human Papillomavirus
TITLTAEVMSY

SEQ ID NO: 38309 - protein, 9 aa, Artificial Sequence
  Peptide Derived from Human Papillomavirus
TIYNPETQR

SEQ ID NO: 38310 - protein, 9 aa, Artificial Sequence
  Peptide Derived from Human Papillomavirus
TLTAEVMSY

SEQ ID NO: 38311 - protein, 11 aa, Artificial Sequence
  Peptide Derived from Human Papillomavirus
TLTAEVMSYIH

SEQ ID NO: 38312 - protein, 9 aa, Artificial Sequence
  Peptide Derived from Human Papillomavirus
TSDSQLFNK

SEQ ID NO: 38313 - protein, 11 aa, Artificial Sequence
  Peptide Derived from Human Papillomavirus
TSDSQLFNKPY

SEQ ID NO: 38314 - protein, 11 aa, Artificial Sequence
  Peptide Derived from Human Papillomavirus
TSIFYHAGSSR

SEQ ID NO: 38315 - protein, 8 aa, Artificial Sequence
  Peptide Derived from Human Papillomavirus
TSLVDTYR

SEQ ID NO: 38316 - protein, 9 aa, Artificial Sequence
  Peptide Derived from Human Papillomavirus
TSLVDTYRF

SEQ ID NO: 38317 - protein, 8 aa, Artificial Sequence
  Peptide Derived from Human Papillomavirus
TSTASRPA

SEQ ID NO: 38318 - protein, 9 aa, Artificial Sequence
  Peptide Derived from Human Papillomavirus
TSTASRPAK

SEQ ID NO: 38319 - protein, 10 aa, Artificial Sequence
  Peptide Derived from Human Papillomavirus
TSTASRPAKR

SEQ ID NO: 38320 - protein, 10 aa, Artificial Sequence
  Peptide Derived from Human Papillomavirus
TTPPEKQDPY

SEQ ID NO: 38321 - protein, 11 aa, Artificial Sequence
  Peptide Derived from Human Papillomavirus
TTRSTNLTLCA

SEQ ID NO: 38322 - protein, 8 aa, Artificial Sequence
  Peptide Derived from Human Papillomavirus
TTSDSQLF

SEQ ID NO: 38323 - protein, 10 aa, Artificial Sequence
  Peptide Derived from Human Papillomavirus
TTSDSQLFNK

SEQ ID NO: 38324 - protein, 8 aa, Artificial Sequence
  Peptide Derived from Human Papillomavirus
TTSLVDTY

SEQ ID NO: 38325 - protein, 9 aa, Artificial Sequence
  Peptide Derived from Human Papillomavirus
TTSLVDTYR

SEQ ID NO: 38326 - protein, 10 aa, Artificial Sequence
  Peptide Derived from Human Papillomavirus
TTSLVDTYRF

SEQ ID NO: 38327 - protein, 8 aa, Artificial Sequence
  Peptide Derived from Human Papillomavirus
TVDLKEKF

SEQ ID NO: 38328 - protein, 8 aa, Artificial Sequence
  Peptide Derived from Human Papillomavirus
TVGNPYFR

SEQ ID NO: 38329 - protein, 9 aa, Artificial Sequence
  Peptide Derived from Human Papillomavirus
TVPTDLYIK

SEQ ID NO: 38330 - protein, 10 aa, Artificial Sequence
  Peptide Derived from Human Papillomavirus
TVYLPPPSVA

SEQ ID NO: 38331 - protein, 11 aa, Artificial Sequence
  Peptide Derived from Human Papillomavirus
TVYLPPPSVAR

SEQ ID NO: 38332 - protein, 8 aa, Artificial Sequence
  Peptide Derived from Human Papillomavirus
VALPDPNK

SEQ ID NO: 38333 - protein, 9 aa, Artificial Sequence
  Peptide Derived from Human Papillomavirus
VALPDPNKF

SEQ ID NO: 38334 - protein, 10 aa, Artificial Sequence
  Peptide Derived from Human Papillomavirus
VARVVNTDDY

SEQ ID NO: 38335 - protein, 10 aa, Artificial Sequence
  Peptide Derived from Human Papillomavirus
VDTGYGAMDF

SEQ ID NO: 38336 - protein, 11 aa, Artificial Sequence
  Peptide Derived from Human Papillomavirus
VDTYRFVQSVA

SEQ ID NO: 38337 - protein, 9 aa, Artificial Sequence
  Peptide Derived from Human Papillomavirus
VFPIFLQMA

SEQ ID NO: 38338 - protein, 11 aa, Artificial Sequence
  Peptide Derived from Human Papillomavirus
VFRVALPDPNK

SEQ ID NO: 38339 - protein, 11 aa, Artificial Sequence
  Peptide Derived from Human Papillomavirus
VMGDTVPTDLY

SEQ ID NO: 38340 - protein, 9 aa, Artificial Sequence
  Peptide Derived from Human Papillomavirus
VSAYQYRVF

SEQ ID NO: 38341 - protein, 10 aa, Artificial Sequence
  Peptide Derived from Human Papillomavirus
VSAYQYRVFR

SEQ ID NO: 38342 - protein, 8 aa, Artificial Sequence
  Peptide Derived from Human Papillomavirus
VSRTSIFY

SEQ ID NO: 38343 - protein, 9 aa, Artificial Sequence
  Peptide Derived from Human Papillomavirus
VSRTSIFYH

SEQ ID NO: 38344 - protein, 10 aa, Artificial Sequence
  Peptide Derived from Human Papillomavirus
VSRTSIFYHA

SEQ ID NO: 38345 - protein, 8 aa, Artificial Sequence
  Peptide Derived from Human Papillomavirus
VTVVDTTR

SEQ ID NO: 38346 - protein, 10 aa, Artificial Sequence
  Peptide Derived from Human Papillomavirus
VVNTDDYVSR

SEQ ID NO: 38347 - protein, 9 aa, Artificial Sequence
  Peptide Derived from Human Papillomavirus
VVPSGAGNK

SEQ ID NO: 38348 - protein, 11 aa, Artificial Sequence
  Peptide Derived from Human Papillomavirus
VVPSGAGNKQA

SEQ ID NO: 38349 - protein, 10 aa, Artificial Sequence
  Peptide Derived from Human Papillomavirus
WACVGMEIGR

SEQ ID NO: 38350 - protein, 8 aa, Artificial Sequence
  Peptide Derived from Human Papillomavirus
WAKGTLCK

SEQ ID NO: 38351 - protein, 10 aa, Artificial Sequence
  Peptide Derived from Human Papillomavirus
WAKGTLCKPA

SEQ ID NO: 38352 - protein, 8 aa, Artificial Sequence
  Peptide Derived from Human Papillomavirus
WLHKAQGH

SEQ ID NO: 38353 - protein, 8 aa, Artificial Sequence
  Peptide Derived from Human Papillomavirus
WTVDLKEK

SEQ ID NO: 38354 - protein, 9 aa, Artificial Sequence
  Peptide Derived from Human Papillomavirus
WTVDLKEKF

SEQ ID NO: 38355 - protein, 8 aa, Artificial Sequence
  Peptide Derived from Human Papillomavirus
YDPTKFKH

SEQ ID NO: 38356 - protein, 9 aa, Artificial Sequence
  Peptide Derived from Human Papillomavirus
YDPTKFKHY

SEQ ID NO: 38357 - protein, 11 aa, Artificial Sequence
  Peptide Derived from Human Papillomavirus
YDPTKFKHYSR

SEQ ID NO: 38358 - protein, 9 aa, Artificial Sequence
  Peptide Derived from Human Papillomavirus
YFRVVPSGA

SEQ ID NO: 38359 - protein, 10 aa, Artificial Sequence
  Peptide Derived from Human Papillomavirus
YGDSMFFCLR

SEQ ID NO: 38360 - protein, 11 aa, Artificial Sequence
  Peptide Derived from Human Papillomavirus
YGDSMFFCLRR

SEQ ID NO: 38361 - protein, 8 aa, Artificial Sequence
  Peptide Derived from Human Papillomavirus
YGHGIIIF

SEQ ID NO: 38362 - protein, 10 aa, Artificial Sequence
  Peptide Derived from Human Papillomavirus
YGHGIIIFLK

SEQ ID NO: 38363 - protein, 10 aa, Artificial Sequence
  Peptide Derived from Human Papillomavirus
YIKGTSANMR

SEQ ID NO: 38364 - protein, 8 aa, Artificial Sequence
  Peptide Derived from Human Papillomavirus
YLPPPSVA

SEQ ID NO: 38365 - protein, 9 aa, Artificial Sequence
  Peptide Derived from Human Papillomavirus
YLPPPSVAR

SEQ ID NO: 38366 - protein, 9 aa, Artificial Sequence
  Peptide Derived from Human Papillomavirus
YLQMSADPY

SEQ ID NO: 38367 - protein, 8 aa, Artificial Sequence
  Peptide Derived from Human Papillomavirus
YSRHVEEY

SEQ ID NO: 38368 - protein, 8 aa, Artificial Sequence
  Peptide Derived from Human Papillomavirus
YVSRTSIF

SEQ ID NO: 38369 - protein, 9 aa, Artificial Sequence
  Peptide Derived from Human Papillomavirus
YVSRTSIFY

SEQ ID NO: 38370 - protein, 10 aa, Artificial Sequence
  Peptide Derived from Human Papillomavirus
YVSRTSIFYH

SEQ ID NO: 38371 - protein, 11 aa, Artificial Sequence
  Peptide Derived from Human Papillomavirus
YVSRTSIFYHA

SEQ ID NO: 38372 - protein, 9 aa, Artificial Sequence
  Peptide Derived from Human Papillomavirus
AARRKRASA

SEQ ID NO: 38373 - protein, 10 aa, Artificial Sequence
  Peptide Derived from Human Papillomavirus
ALSSRRGTVR

SEQ ID NO: 38374 - protein, 11 aa, Artificial Sequence
  Peptide Derived from Human Papillomavirus
ALSSRRGTVRF

SEQ ID NO: 38375 - protein, 8 aa, Artificial Sequence
  Peptide Derived from Human Papillomavirus
ASATDLYR

SEQ ID NO: 38376 - protein, 11 aa, Artificial Sequence
  Peptide Derived from Human Papillomavirus
ASATDLYRTCK

SEQ ID NO: 38377 - protein, 9 aa, Artificial Sequence
  Peptide Derived from Human Papillomavirus
ASGAPVPTF

SEQ ID NO: 38378 - protein, 9 aa, Artificial Sequence
  Peptide Derived from Human Papillomavirus
ASTTPSTIH

SEQ ID NO: 38379 - protein, 10 aa, Artificial Sequence
  Peptide Derived from Human Papillomavirus
ASTTPSTIHK

SEQ ID NO: 38380 - protein, 10 aa, Artificial Sequence
  Peptide Derived from Human Papillomavirus
ASTTTYIGIH

SEQ ID NO: 38381 - protein, 9 aa, Artificial Sequence
  Peptide Derived from Human Papillomavirus
ATDLYRTCK

SEQ ID NO: 38382 - protein, 9 aa, Artificial Sequence
  Peptide Derived from Human Papillomavirus
ATMFTRSGK

SEQ ID NO: 38383 - protein, 8 aa, Artificial Sequence
  Peptide Derived from Human Papillomavirus
ATNDSDLF

SEQ ID NO: 38384 - protein, 11 aa, Artificial Sequence
  Peptide Derived from Human Papillomavirus
ATNDSDLFDVY

SEQ ID NO: 38385 - protein, 9 aa, Artificial Sequence
  Peptide Derived from Human Papillomavirus
DFMDIIRLH

SEQ ID NO: 38386 - protein, 10 aa, Artificial Sequence
  Peptide Derived from Human Papillomavirus
DFMDIIRLHR

SEQ ID NO: 38387 - protein, 9 aa, Artificial Sequence
  Peptide Derived from Human Papillomavirus
DIIRLHRPA

SEQ ID NO: 38388 - protein, 9 aa, Artificial Sequence
  Peptide Derived from Human Papillomavirus
DLFDVYADF

SEQ ID NO: 38389 - protein, 9 aa, Artificial Sequence
  Peptide Derived from Human Papillomavirus
DSDFMDIIR

SEQ ID NO: 38390 - protein, 11 aa, Artificial Sequence
  Peptide Derived from Human Papillomavirus
DSDFMDIIRLH

SEQ ID NO: 38391 - protein, 8 aa, Artificial Sequence
  Peptide Derived from Human Papillomavirus
DSDLFDVY

SEQ ID NO: 38392 - protein, 9 aa, Artificial Sequence
  Peptide Derived from Human Papillomavirus
DSDLFDVYA

SEQ ID NO: 38393 - protein, 11 aa, Artificial Sequence
  Peptide Derived from Human Papillomavirus
DSDLFDVYADF

SEQ ID NO: 38394 - protein, 9 aa, Artificial Sequence
  Peptide Derived from Human Papillomavirus
DSSVVASGA

SEQ ID NO: 38395 - protein, 10 aa, Artificial Sequence
  Peptide Derived from Human Papillomavirus
DSVSISSTSF

SEQ ID NO: 38396 - protein, 10 aa, Artificial Sequence
  Peptide Derived from Human Papillomavirus
DVYADFPPPA

SEQ ID NO: 38397 - protein, 10 aa, Artificial Sequence
  Peptide Derived from Human Papillomavirus
EDSSVVASGA

SEQ ID NO: 38398 - protein, 8 aa, Artificial Sequence
  Peptide Derived from Human Papillomavirus
EGTTLADK

SEQ ID NO: 38399 - protein, 10 aa, Artificial Sequence
  Peptide Derived from Human Papillomavirus
EIELQPLISA

SEQ ID NO: 38400 - protein, 8 aa, Artificial Sequence
  Peptide Derived from Human Papillomavirus
EIPLQTFA

SEQ ID NO: 38401 - protein, 11 aa, Artificial Sequence
  Peptide Derived from Human Papillomavirus
EITSSGTTTPA

SEQ ID NO: 38402 - protein, 8 aa, Artificial Sequence
  Peptide Derived from Human Papillomavirus
ELQPLISA

SEQ ID NO: 38403 - protein, 8 aa, Artificial Sequence
  Peptide Derived from Human Papillomavirus
FADGFVAA

SEQ ID NO: 38404 - protein, 11 aa, Artificial Sequence
  Peptide Derived from Human Papillomavirus
FDVYADFPPPA

SEQ ID NO: 38405 - protein, 8 aa, Artificial Sequence
  Peptide Derived from Human Papillomavirus
FFADGFVA

SEQ ID NO: 38406 - protein, 9 aa, Artificial Sequence
  Peptide Derived from Human Papillomavirus
FFADGFVAA

SEQ ID NO: 38407 - protein, 11 aa, Artificial Sequence
  Peptide Derived from Human Papillomavirus
FLTHPSSLVTF

SEQ ID NO: 38408 - protein, 8 aa, Artificial Sequence
  Peptide Derived from Human Papillomavirus
FMDIIRLH

SEQ ID NO: 38409 - protein, 9 aa, Artificial Sequence
  Peptide Derived from Human Papillomavirus
FMDIIRLHR

SEQ ID NO: 38410 - protein, 11 aa, Artificial Sequence
  Peptide Derived from Human Papillomavirus
FMDIIRLHRPA

SEQ ID NO: 38411 - protein, 8 aa, Artificial Sequence
  Peptide Derived from Human Papillomavirus
FSRLGQRA

SEQ ID NO: 38412 - protein, 11 aa, Artificial Sequence
  Peptide Derived from Human Papillomavirus
FSRLGQRATMF

SEQ ID NO: 38413 - protein, 11 aa, Artificial Sequence
  Peptide Derived from Human Papillomavirus
FTRSGKQIGGR

SEQ ID NO: 38414 - protein, 10 aa, Artificial Sequence
  Peptide Derived from Human Papillomavirus
FVGTPTSGSH

SEQ ID NO: 38415 - protein, 8 aa, Artificial Sequence
  Peptide Derived from Human Papillomavirus
GGRVHFYH

SEQ ID NO: 38416 - protein, 11 aa, Artificial Sequence
  Peptide Derived from Human Papillomavirus
GIGTGSGSGGR

SEQ ID NO: 38417 - protein, 8 aa, Artificial Sequence
  Peptide Derived from Human Papillomavirus
GIHGTQYY

SEQ ID NO: 38418 - protein, 8 aa, Artificial Sequence
  Peptide Derived from Human Papillomavirus
GSGGRTGY

SEQ ID NO: 38419 - protein, 10 aa, Artificial Sequence
  Peptide Derived from Human Papillomavirus
GSGSGGRTGY

SEQ ID NO: 38420 - protein, 10 aa, Artificial Sequence
  Peptide Derived from Human Papillomavirus
GTCPPDVINK

SEQ ID NO: 38421 - protein, 9 aa, Artificial Sequence
  Peptide Derived from Human Papillomavirus
GTGSGSGGR

SEQ ID NO: 38422 - protein, 8 aa, Artificial Sequence
  Peptide Derived from Human Papillomavirus
GTPTSGSH

SEQ ID NO: 38423 - protein, 10 aa, Artificial Sequence
  Peptide Derived from Human Papillomavirus
GTPTSGSHGY

SEQ ID NO: 38424 - protein, 10 aa, Artificial Sequence
  Peptide Derived from Human Papillomavirus
GTQYYLWPWY

SEQ ID NO: 38425 - protein, 11 aa, Artificial Sequence
  Peptide Derived from Human Papillomavirus
GTQYYLWPWYY

SEQ ID NO: 38426 - protein, 11 aa, Artificial Sequence
  Peptide Derived from Human Papillomavirus
GTVRFSRLGQR

SEQ ID NO: 38427 - protein, 8 aa, Artificial Sequence
  Peptide Derived from Human Papillomavirus
HDISPIAA

SEQ ID NO: 38428 - protein, 10 aa, Artificial Sequence
  Peptide Derived from Human Papillomavirus
HFYHDISPIA

SEQ ID NO: 38429 - protein, 11 aa, Artificial Sequence
  Peptide Derived from Human Papillomavirus
HFYHDISPIAA

SEQ ID NO: 38430 - protein, 11 aa, Artificial Sequence
  Peptide Derived from Human Papillomavirus
HGTQYYLWPWY

SEQ ID NO: 38431 - protein, 11 aa, Artificial Sequence
  Peptide Derived from Human Papillomavirus
HGYEEIPLQTF

SEQ ID NO: 38432 - protein, 11 aa, Artificial Sequence
  Peptide Derived from Human Papillomavirus
IFVGTPTSGSH

SEQ ID NO: 38433 - protein, 8 aa, Artificial Sequence
  Peptide Derived from Human Papillomavirus
IGGRVHFY

SEQ ID NO: 38434 - protein, 9 aa, Artificial Sequence
  Peptide Derived from Human Papillomavirus
IGGRVHFYH

SEQ ID NO: 38435 - protein, 8 aa, Artificial Sequence
  Peptide Derived from Human Papillomavirus
IGIHGTQY

SEQ ID NO: 38436 - protein, 9 aa, Artificial Sequence
  Peptide Derived from Human Papillomavirus
IGIHGTQYY

SEQ ID NO: 38437 - protein, 10 aa, Artificial Sequence
  Peptide Derived from Human Papillomavirus
IGTGSGSGGR

SEQ ID NO: 38438 - protein, 8 aa, Artificial Sequence
  Peptide Derived from Human Papillomavirus
IIRLHRPA

SEQ ID NO: 38439 - protein, 10 aa, Artificial Sequence
  Peptide Derived from Human Papillomavirus
ILQWSSLGIF

SEQ ID NO: 38440 - protein, 10 aa, Artificial Sequence
  Peptide Derived from Human Papillomavirus
ISATNDSDLF

SEQ ID NO: 38441 - protein, 10 aa, Artificial Sequence
  Peptide Derived from Human Papillomavirus
ISSTPLPTVR

SEQ ID NO: 38442 - protein, 11 aa, Artificial Sequence
  Peptide Derived from Human Papillomavirus
ISSTPLPTVRR

SEQ ID NO: 38443 - protein, 10 aa, Artificial Sequence
  Peptide Derived from Human Papillomavirus
ISSTSFTNPA

SEQ ID NO: 38444 - protein, 11 aa, Artificial Sequence
  Peptide Derived from Human Papillomavirus
ISSTSFTNPAF

SEQ ID NO: 38445 - protein, 10 aa, Artificial Sequence
  Peptide Derived from Human Papillomavirus
ITSSGTTTPA

SEQ ID NO: 38446 - protein, 11 aa, Artificial Sequence
  Peptide Derived from Human Papillomavirus
KILQWSSLGIF

SEQ ID NO: 38447 - protein, 8 aa, Artificial Sequence
  Peptide Derived from Human Papillomavirus
KSFTYPKY

SEQ ID NO: 38448 - protein, 8 aa, Artificial Sequence
  Peptide Derived from Human Papillomavirus
KVEGTTLA

SEQ ID NO: 38449 - protein, 10 aa, Artificial Sequence
  Peptide Derived from Human Papillomavirus
KVEGTTLADK

SEQ ID NO: 38450 - protein, 8 aa, Artificial Sequence
  Peptide Derived from Human Papillomavirus
LFDVYADF

SEQ ID NO: 38451 - protein, 8 aa, Artificial Sequence
  Peptide Derived from Human Papillomavirus
LGQRATMF

SEQ ID NO: 38452 - protein, 10 aa, Artificial Sequence
  Peptide Derived from Human Papillomavirus
LGQRATMFTR

SEQ ID NO: 38453 - protein, 11 aa, Artificial Sequence
  Peptide Derived from Human Papillomavirus
LISATNDSDLF

SEQ ID NO: 38454 - protein, 9 aa, Artificial Sequence
  Peptide Derived from Human Papillomavirus
LSSRRGTVR

SEQ ID NO: 38455 - protein, 10 aa, Artificial Sequence
  Peptide Derived from Human Papillomavirus
LSSRRGTVRF

SEQ ID NO: 38456 - protein, 10 aa, Artificial Sequence
  Peptide Derived from Human Papillomavirus
LTHPSSLVTF

SEQ ID NO: 38457 - protein, 8 aa, Artificial Sequence
  Peptide Derived from Human Papillomavirus
LTMPSTAA

SEQ ID NO: 38458 - protein, 11 aa, Artificial Sequence
  Peptide Derived from Human Papillomavirus
LTMPSTAASSY

SEQ ID NO: 38459 - protein, 10 aa, Artificial Sequence
  Peptide Derived from Human Papillomavirus
LTSAWDVPIY

SEQ ID NO: 38460 - protein, 9 aa, Artificial Sequence
  Peptide Derived from Human Papillomavirus
LVEDSSVVA

SEQ ID NO: 38461 - protein, 8 aa, Artificial Sequence
  Peptide Derived from Human Papillomavirus
LVTFDNPA

SEQ ID NO: 38462 - protein, 9 aa, Artificial Sequence
  Peptide Derived from Human Papillomavirus
LVTFDNPAY

SEQ ID NO: 38463 - protein, 8 aa, Artificial Sequence
  Peptide Derived from Human Papillomavirus
MDIIRLHR

SEQ ID NO: 38464 - protein, 10 aa, Artificial Sequence
  Peptide Derived from Human Papillomavirus
MDIIRLHRPA

SEQ ID NO: 38465 - protein, 8 aa, Artificial Sequence
  Peptide Derived from Human Papillomavirus
MVSHRAAR

SEQ ID NO: 38466 - protein, 9 aa, Artificial Sequence
  Peptide Derived from Human Papillomavirus
MVSHRAARR

SEQ ID NO: 38467 - protein, 10 aa, Artificial Sequence
  Peptide Derived from Human Papillomavirus
MVSHRAARRK

SEQ ID NO: 38468 - protein, 11 aa, Artificial Sequence
  Peptide Derived from Human Papillomavirus
MVSHRAARRKR

SEQ ID NO: 38469 - protein, 11 aa, Artificial Sequence
  Peptide Derived from Human Papillomavirus
NASTTTYIGIH

SEQ ID NO: 38470 - protein, 9 aa, Artificial Sequence
  Peptide Derived from Human Papillomavirus
NDSDLFDVY

SEQ ID NO: 38471 - protein, 10 aa, Artificial Sequence
  Peptide Derived from Human Papillomavirus
NDSDLFDVYA

SEQ ID NO: 38472 - protein, 10 aa, Artificial Sequence
  Peptide Derived from Human Papillomavirus
NTVVDVGPTR

SEQ ID NO: 38473 - protein, 9 aa, Artificial Sequence
  Peptide Derived from Human Papillomavirus
NVTVPLTSA

SEQ ID NO: 38474 - protein, 11 aa, Artificial Sequence
  Peptide Derived from Human Papillomavirus
PALSSRRGTVR

SEQ ID NO: 38475 - protein, 10 aa, Artificial Sequence
  Peptide Derived from Human Papillomavirus
PASTTPSTIH

SEQ ID NO: 38476 - protein, 11 aa, Artificial Sequence
  Peptide Derived from Human Papillomavirus
PASTTPSTIHK

SEQ ID NO: 38477 - protein, 8 aa, Artificial Sequence
  Peptide Derived from Human Papillomavirus
PDIILPSH

SEQ ID NO: 38478 - protein, 10 aa, Artificial Sequence
  Peptide Derived from Human Papillomavirus
PDSDFMDIIR

SEQ ID NO: 38479 - protein, 11 aa, Artificial Sequence
  Peptide Derived from Human Papillomavirus
PISSTPLPTVR

SEQ ID NO: 38480 - protein, 8 aa, Artificial Sequence
  Peptide Derived from Human Papillomavirus
PLDTTLSF

SEQ ID NO: 38481 - protein, 9 aa, Artificial Sequence
  Peptide Derived from Human Papillomavirus
PLPTVRRVR

SEQ ID NO: 38482 - protein, 11 aa, Artificial Sequence
  Peptide Derived from Human Papillomavirus
PLTSAWDVPIY

SEQ ID NO: 38483 - protein, 11 aa, Artificial Sequence
  Peptide Derived from Human Papillomavirus
PMWPSTSPTNA

SEQ ID NO: 38484 - protein, 11 aa, Artificial Sequence
  Peptide Derived from Human Papillomavirus
PSSLVTFDNPA

SEQ ID NO: 38485 - protein, 8 aa, Artificial Sequence
  Peptide Derived from Human Papillomavirus
PSTAASSY

SEQ ID NO: 38486 - protein, 8 aa, Artificial Sequence
  Peptide Derived from Human Papillomavirus
PSTIHKSF

SEQ ID NO: 38487 - protein, 10 aa, Artificial Sequence
  Peptide Derived from Human Papillomavirus
PSTIHKSFTY

SEQ ID NO: 38488 - protein, 8 aa, Artificial Sequence
  Peptide Derived from Human Papillomavirus
PSTSPTNA

SEQ ID NO: 38489 - protein, 9 aa, Artificial Sequence
  Peptide Derived from Human Papillomavirus
PTFTGTSGF

SEQ ID NO: 38490 - protein, 9 aa, Artificial Sequence
  Peptide Derived from Human Papillomavirus
PTNASTTTY

SEQ ID NO: 38491 - protein, 8 aa, Artificial Sequence
  Peptide Derived from Human Papillomavirus
PTSGSHGY

SEQ ID NO: 38492 - protein, 10 aa, Artificial Sequence
  Peptide Derived from Human Papillomavirus
PTSNVPDSDF

SEQ ID NO: 38493 - protein, 10 aa, Artificial Sequence
  Peptide Derived from Human Papillomavirus
PTVRRVRGPR

SEQ ID NO: 38494 - protein, 11 aa, Artificial Sequence
  Peptide Derived from Human Papillomavirus
PVPTFTGTSGF

SEQ ID NO: 38495 - protein, 8 aa, Artificial Sequence
  Peptide Derived from Human Papillomavirus
QIGGRVHF

SEQ ID NO: 38496 - protein, 9 aa, Artificial Sequence
  Peptide Derived from Human Papillomavirus
QIGGRVHFY

SEQ ID NO: 38497 - protein, 10 aa, Artificial Sequence
  Peptide Derived from Human Papillomavirus
QIGGRVHFYH

SEQ ID NO: 38498 - protein, 10 aa, Artificial Sequence
  Peptide Derived from Human Papillomavirus
QTGEVSGNIF

SEQ ID NO: 38499 - protein, 9 aa, Artificial Sequence
  Peptide Derived from Human Papillomavirus
QVRVSTSQF

SEQ ID NO: 38500 - protein, 8 aa, Artificial Sequence
  Peptide Derived from Human Papillomavirus
RAARRKRA

SEQ ID NO: 38501 - protein, 10 aa, Artificial Sequence
  Peptide Derived from Human Papillomavirus
RAARRKRASA

SEQ ID NO: 38502 - protein, 8 aa, Artificial Sequence
  Peptide Derived from Human Papillomavirus
RASATDLY

SEQ ID NO: 38503 - protein, 9 aa, Artificial Sequence
  Peptide Derived from Human Papillomavirus
RASATDLYR

SEQ ID NO: 38504 - protein, 10 aa, Artificial Sequence
  Peptide Derived from Human Papillomavirus
RATMFTRSGK

SEQ ID NO: 38505 - protein, 8 aa, Artificial Sequence
  Peptide Derived from Human Papillomavirus
RFSRLGQR

SEQ ID NO: 38506 - protein, 9 aa, Artificial Sequence
  Peptide Derived from Human Papillomavirus
RFSRLGQRA

SEQ ID NO: 38507 - protein, 8 aa, Artificial Sequence
  Peptide Derived from Human Papillomavirus
RGPRLYSR

SEQ ID NO: 38508 - protein, 9 aa, Artificial Sequence
  Peptide Derived from Human Papillomavirus
RGPRLYSRA

SEQ ID NO: 38509 - protein, 8 aa, Artificial Sequence
  Peptide Derived from Human Papillomavirus
RGTVRFSR

SEQ ID NO: 38510 - protein, 10 aa, Artificial Sequence
  Peptide Derived from Human Papillomavirus
RIPYFFADGF

SEQ ID NO: 38511 - protein, 9 aa, Artificial Sequence
  Peptide Derived from Human Papillomavirus
RLGQRATMF

SEQ ID NO: 38512 - protein, 11 aa, Artificial Sequence
  Peptide Derived from Human Papillomavirus
RLGQRATMFTR

SEQ ID NO: 38513 - protein, 10 aa, Artificial Sequence
  Peptide Derived from Human Papillomavirus
RLHRPALSSR

SEQ ID NO: 38514 - protein, 11 aa, Artificial Sequence
  Peptide Derived from Human Papillomavirus
RLHRPALSSRR

SEQ ID NO: 38515 - protein, 11 aa, Artificial Sequence
  Peptide Derived from Human Papillomavirus
RLYSRANQQVR

SEQ ID NO: 38516 - protein, 9 aa, Artificial Sequence
  Peptide Derived from Human Papillomavirus
RSGKQIGGR

SEQ ID NO: 38517 - protein, 11 aa, Artificial Sequence
  Peptide Derived from Human Papillomavirus
RSGKQIGGRVH

SEQ ID NO: 38518 - protein, 10 aa, Artificial Sequence
  Peptide Derived from Human Papillomavirus
RTGYVPLGGR

SEQ ID NO: 38519 - protein, 8 aa, Artificial Sequence
  Peptide Derived from Human Papillomavirus
RVRGPRLY

SEQ ID NO: 38520 - protein, 10 aa, Artificial Sequence
  Peptide Derived from Human Papillomavirus
RVRGPRLYSR

SEQ ID NO: 38521 - protein, 11 aa, Artificial Sequence
  Peptide Derived from Human Papillomavirus
RVRGPRLYSRA

SEQ ID NO: 38522 - protein, 10 aa, Artificial Sequence
  Peptide Derived from Human Papillomavirus
RVSTSQFLTH

SEQ ID NO: 38523 - protein, 10 aa, Artificial Sequence
  Peptide Derived from Human Papillomavirus
SATDLYRTCK

SEQ ID NO: 38524 - protein, 9 aa, Artificial Sequence
  Peptide Derived from Human Papillomavirus
SATNDSDLF

SEQ ID NO: 38525 - protein, 8 aa, Artificial Sequence
  Peptide Derived from Human Papillomavirus
SAWDVPIY

SEQ ID NO: 38526 - protein, 8 aa, Artificial Sequence
  Peptide Derived from Human Papillomavirus
SDFMDIIR

SEQ ID NO: 38527 - protein, 10 aa, Artificial Sequence
  Peptide Derived from Human Papillomavirus
SDFMDIIRLH

SEQ ID NO: 38528 - protein, 11 aa, Artificial Sequence
  Peptide Derived from Human Papillomavirus
SDFMDIIRLHR

SEQ ID NO: 38529 - protein, 8 aa, Artificial Sequence
  Peptide Derived from Human Papillomavirus
SDLFDVYA

SEQ ID NO: 38530 - protein, 10 aa, Artificial Sequence
  Peptide Derived from Human Papillomavirus
SDLFDVYADF

SEQ ID NO: 38531 - protein, 8 aa, Artificial Sequence
  Peptide Derived from Human Papillomavirus
SGAPVPTF

SEQ ID NO: 38532 - protein, 8 aa, Artificial Sequence
  Peptide Derived from Human Papillomavirus
SGKQIGGR

SEQ ID NO: 38533 - protein, 10 aa, Artificial Sequence
  Peptide Derived from Human Papillomavirus
SGKQIGGRVH

SEQ ID NO: 38534 - protein, 11 aa, Artificial Sequence
  Peptide Derived from Human Papillomavirus
SGKQIGGRVHF

SEQ ID NO: 38535 - protein, 9 aa, Artificial Sequence
  Peptide Derived from Human Papillomavirus
SGSGGRTGY

SEQ ID NO: 38536 - protein, 11 aa, Artificial Sequence
  Peptide Derived from Human Papillomavirus
SGTCPPDVINK

SEQ ID NO: 38537 - protein, 11 aa, Artificial Sequence
  Peptide Derived from Human Papillomavirus
SISSTSFTNPA

SEQ ID NO: 38538 - protein, 8 aa, Artificial Sequence
  Peptide Derived from Human Papillomavirus
SLTMPSTA

SEQ ID NO: 38539 - protein, 9 aa, Artificial Sequence
  Peptide Derived from Human Papillomavirus
SLTMPSTAA

SEQ ID NO: 38540 - protein, 9 aa, Artificial Sequence
  Peptide Derived from Human Papillomavirus
SLVTFDNPA

SEQ ID NO: 38541 - protein, 10 aa, Artificial Sequence
  Peptide Derived from Human Papillomavirus
SLVTFDNPAY

SEQ ID NO: 38542 - protein, 8 aa, Artificial Sequence
  Peptide Derived from Human Papillomavirus
SSGTTTPA

SEQ ID NO: 38543 - protein, 10 aa, Artificial Sequence
  Peptide Derived from Human Papillomavirus
SSLVTFDNPA

SEQ ID NO: 38544 - protein, 11 aa, Artificial Sequence
  Peptide Derived from Human Papillomavirus
SSLVTFDNPAY

SEQ ID NO: 38545 - protein, 8 aa, Artificial Sequence
  Peptide Derived from Human Papillomavirus
SSRRGTVR

SEQ ID NO: 38546 - protein, 9 aa, Artificial Sequence
  Peptide Derived from Human Papillomavirus
SSRRGTVRF

SEQ ID NO: 38547 - protein, 11 aa, Artificial Sequence
  Peptide Derived from Human Papillomavirus
SSRRGTVRFSR

SEQ ID NO: 38548 - protein, 9 aa, Artificial Sequence
  Peptide Derived from Human Papillomavirus
SSTPLPTVR

SEQ ID NO: 38549 - protein, 10 aa, Artificial Sequence
  Peptide Derived from Human Papillomavirus
SSTPLPTVRR

SEQ ID NO: 38550 - protein, 9 aa, Artificial Sequence
  Peptide Derived from Human Papillomavirus
SSTSFTNPA

SEQ ID NO: 38551 - protein, 10 aa, Artificial Sequence
  Peptide Derived from Human Papillomavirus
SSTSFTNPAF

SEQ ID NO: 38552 - protein, 8 aa, Artificial Sequence
  Peptide Derived from Human Papillomavirus
SSVVASGA

SEQ ID NO: 38553 - protein, 9 aa, Artificial Sequence
  Peptide Derived from Human Papillomavirus
STIHKSFTY

SEQ ID NO: 38554 - protein, 11 aa, Artificial Sequence
  Peptide Derived from Human Papillomavirus
STIHKSFTYPK

SEQ ID NO: 38555 - protein, 8 aa, Artificial Sequence
  Peptide Derived from Human Papillomavirus
STPLPTVR

SEQ ID NO: 38556 - protein, 9 aa, Artificial Sequence
  Peptide Derived from Human Papillomavirus
STPLPTVRR

SEQ ID NO: 38557 - protein, 11 aa, Artificial Sequence
  Peptide Derived from Human Papillomavirus
STPLPTVRRVR

SEQ ID NO: 38558 - protein, 8 aa, Artificial Sequence
  Peptide Derived from Human Papillomavirus
STSFTNPA

SEQ ID NO: 38559 - protein, 9 aa, Artificial Sequence
  Peptide Derived from Human Papillomavirus
STSFTNPAF

SEQ ID NO: 38560 - protein, 8 aa, Artificial Sequence
  Peptide Derived from Human Papillomavirus
STSQFLTH

SEQ ID NO: 38561 - protein, 8 aa, Artificial Sequence
  Peptide Derived from Human Papillomavirus
STTPSTIH

SEQ ID NO: 38562 - protein, 9 aa, Artificial Sequence
  Peptide Derived from Human Papillomavirus
STTPSTIHK

SEQ ID NO: 38563 - protein, 11 aa, Artificial Sequence
  Peptide Derived from Human Papillomavirus
STTPSTIHKSF

SEQ ID NO: 38564 - protein, 9 aa, Artificial Sequence
  Peptide Derived from Human Papillomavirus
STTTYIGIH

SEQ ID NO: 38565 - protein, 9 aa, Artificial Sequence
  Peptide Derived from Human Papillomavirus
SVSISSTSF

SEQ ID NO: 38566 - protein, 9 aa, Artificial Sequence
  Peptide Derived from Human Papillomavirus
TCPPDVINK

SEQ ID NO: 38567 - protein, 8 aa, Artificial Sequence
  Peptide Derived from Human Papillomavirus
TDLYRTCK

SEQ ID NO: 38568 - protein, 8 aa, Artificial Sequence
  Peptide Derived from Human Papillomavirus
TFTGTSGF

SEQ ID NO: 38569 - protein, 9 aa, Artificial Sequence
  Peptide Derived from Human Papillomavirus
TGEVSGNIF

SEQ ID NO: 38570 - protein, 10 aa, Artificial Sequence
  Peptide Derived from Human Papillomavirus
TGPDIILPSH

SEQ ID NO: 38571 - protein, 8 aa, Artificial Sequence
  Peptide Derived from Human Papillomavirus
TGSGSGGR

SEQ ID NO: 38572 - protein, 11 aa, Artificial Sequence
  Peptide Derived from Human Papillomavirus
TGSGSGGRTGY

SEQ ID NO: 38573 - protein, 9 aa, Artificial Sequence
  Peptide Derived from Human Papillomavirus
TGYVPLGGR

SEQ ID NO: 38574 - protein, 8 aa, Artificial Sequence
  Peptide Derived from Human Papillomavirus
TIHKSFTY

SEQ ID NO: 38575 - protein, 10 aa, Artificial Sequence
  Peptide Derived from Human Papillomavirus
TIHKSFTYPK

SEQ ID NO: 38576 - protein, 11 aa, Artificial Sequence
  Peptide Derived from Human Papillomavirus
TIHKSFTYPKY

SEQ ID NO: 38577 - protein, 10 aa, Artificial Sequence
  Peptide Derived from Human Papillomavirus
TLVEDSSVVA

SEQ ID NO: 38578 - protein, 8 aa, Artificial Sequence
  Peptide Derived from Human Papillomavirus
TMFTRSGK

SEQ ID NO: 38579 - protein, 10 aa, Artificial Sequence
  Peptide Derived from Human Papillomavirus
TMPSTAASSY

SEQ ID NO: 38580 - protein, 9 aa, Artificial Sequence
  Peptide Derived from Human Papillomavirus
TSAWDVPIY

SEQ ID NO: 38581 - protein, 8 aa, Artificial Sequence
  Peptide Derived from Human Papillomavirus
TSFTNPAF

SEQ ID NO: 38582 - protein, 9 aa, Artificial Sequence
  Peptide Derived from Human Papillomavirus
TSNVPDSDF

SEQ ID NO: 38583 - protein, 11 aa, Artificial Sequence
  Peptide Derived from Human Papillomavirus
TSPTNASTTTY

SEQ ID NO: 38584 - protein, 9 aa, Artificial Sequence
  Peptide Derived from Human Papillomavirus
TSSGTTTPA

SEQ ID NO: 38585 - protein, 8 aa, Artificial Sequence
  Peptide Derived from Human Papillomavirus
TTPSTIHK

SEQ ID NO: 38586 - protein, 10 aa, Artificial Sequence
  Peptide Derived from Human Papillomavirus
TTPSTIHKSF

SEQ ID NO: 38587 - protein, 8 aa, Artificial Sequence
  Peptide Derived from Human Papillomavirus
TTTYIGIH

SEQ ID NO: 38588 - protein, 11 aa, Artificial Sequence
  Peptide Derived from Human Papillomavirus
TTYIGIHGTQY

SEQ ID NO: 38589 - protein, 10 aa, Artificial Sequence
  Peptide Derived from Human Papillomavirus
TVRFSRLGQR

SEQ ID NO: 38590 - protein, 11 aa, Artificial Sequence
  Peptide Derived from Human Papillomavirus
TVRFSRLGQRA

SEQ ID NO: 38591 - protein, 9 aa, Artificial Sequence
  Peptide Derived from Human Papillomavirus
TVRRVRGPR

SEQ ID NO: 38592 - protein, 11 aa, Artificial Sequence
  Peptide Derived from Human Papillomavirus
TVRRVRGPRLY

SEQ ID NO: 38593 - protein, 9 aa, Artificial Sequence
  Peptide Derived from Human Papillomavirus
TVVDVGPTR

SEQ ID NO: 38594 - protein, 10 aa, Artificial Sequence
  Peptide Derived from Human Papillomavirus
VASGAPVPTF

SEQ ID NO: 38595 - protein, 11 aa, Artificial Sequence
  Peptide Derived from Human Papillomavirus
VDSVSISSTSF

SEQ ID NO: 38596 - protein, 9 aa, Artificial Sequence
  Peptide Derived from Human Papillomavirus
VGTPTSGSH

SEQ ID NO: 38597 - protein, 11 aa, Artificial Sequence
  Peptide Derived from Human Papillomavirus
VGTPTSGSHGY

SEQ ID NO: 38598 - protein, 11 aa, Artificial Sequence
  Peptide Derived from Human Papillomavirus
VINKVEGTTLA

SEQ ID NO: 38599 - protein, 8 aa, Artificial Sequence
  Peptide Derived from Human Papillomavirus
VSHRAARR

SEQ ID NO: 38600 - protein, 9 aa, Artificial Sequence
  Peptide Derived from Human Papillomavirus
VSHRAARRK

SEQ ID NO: 38601 - protein, 10 aa, Artificial Sequence
  Peptide Derived from Human Papillomavirus
VSHRAARRKR

SEQ ID NO: 38602 - protein, 11 aa, Artificial Sequence
  Peptide Derived from Human Papillomavirus
VSHRAARRKRA

SEQ ID NO: 38603 - protein, 8 aa, Artificial Sequence
  Peptide Derived from Human Papillomavirus
VSISSTSF

SEQ ID NO: 38604 - protein, 9 aa, Artificial Sequence
  Peptide Derived from Human Papillomavirus
VSTSQFLTH

SEQ ID NO: 38605 - protein, 8 aa, Artificial Sequence
  Peptide Derived from Human Papillomavirus
VTFDNPAY

SEQ ID NO: 38606 - protein, 11 aa, Artificial Sequence
  Peptide Derived from Human Papillomavirus
VTLVEDSSVVA

SEQ ID NO: 38607 - protein, 8 aa, Artificial Sequence
  Peptide Derived from Human Papillomavirus
VTVPLTSA

SEQ ID NO: 38608 - protein, 11 aa, Artificial Sequence
  Peptide Derived from Human Papillomavirus
VVASGAPVPTF

SEQ ID NO: 38609 - protein, 8 aa, Artificial Sequence
  Peptide Derived from Human Papillomavirus
VVDVGPTR

SEQ ID NO: 38610 - protein, 8 aa, Artificial Sequence
  Peptide Derived from Human Papillomavirus
YADFPPPA

SEQ ID NO: 38611 - protein, 9 aa, Artificial Sequence
  Peptide Derived from Human Papillomavirus
YFFADGFVA

SEQ ID NO: 38612 - protein, 10 aa, Artificial Sequence
  Peptide Derived from Human Papillomavirus
YFFADGFVAA

SEQ ID NO: 38613 - protein, 8 aa, Artificial Sequence
  Peptide Derived from Human Papillomavirus
YFPKKRKR

SEQ ID NO: 38614 - protein, 11 aa, Artificial Sequence
  Peptide Derived from Human Papillomavirus
YFPKKRKRIPY

SEQ ID NO: 38615 - protein, 9 aa, Artificial Sequence
  Peptide Derived from Human Papillomavirus
YIGIHGTQY

SEQ ID NO: 38616 - protein, 10 aa, Artificial Sequence
  Peptide Derived from Human Papillomavirus
YIGIHGTQYY

SEQ ID NO: 38617 - protein, 8 aa, Artificial Sequence
  Peptide Derived from Human Papillomavirus
YLWPWYYY

SEQ ID NO: 38618 - protein, 9 aa, Artificial Sequence
  Peptide Derived from Human Papillomavirus
YLWPWYYYF

SEQ ID NO: 38619 - protein, 11 aa, Artificial Sequence
  Peptide Derived from Human Papillomavirus
YLWPWYYYFPK

SEQ ID NO: 38620 - protein, 9 aa, Artificial Sequence
  Peptide Derived from Human Papillomavirus
YSLTMPSTA

SEQ ID NO: 38621 - protein, 10 aa, Artificial Sequence
  Peptide Derived from Human Papillomavirus
YSLTMPSTAA

SEQ ID NO: 38622 - protein, 11 aa, Artificial Sequence
  Peptide Derived from Human Papillomavirus
YSNVTVPLTSA

SEQ ID NO: 38623 - protein, 9 aa, Artificial Sequence
  Peptide Derived from Human Papillomavirus
YSRANQQVR

SEQ ID NO: 38624 - protein, 11 aa, Artificial Sequence
  Peptide Derived from Human Papillomavirus
YTGPDIILPSH

SEQ ID NO: 38625 - protein, 9 aa, Artificial Sequence
  Peptide Derived from Human Papillomavirus
AAVSHRPGK

SEQ ID NO: 38626 - protein, 10 aa, Artificial Sequence
  Peptide Derived from Human Papillomavirus
AAVSHRPGKR

SEQ ID NO: 38627 - protein, 10 aa, Artificial Sequence
  Peptide Derived from Human Papillomavirus
ACSAIEVQIA

SEQ ID NO: 38628 - protein, 10 aa, Artificial Sequence
  Peptide Derived from Human Papillomavirus
ALESLSTTIY

SEQ ID NO: 38629 - protein, 8 aa, Artificial Sequence
  Peptide Derived from Human Papillomavirus
AVSHRPGK

SEQ ID NO: 38630 - protein, 9 aa, Artificial Sequence
  Peptide Derived from Human Papillomavirus
AVSHRPGKR

SEQ ID NO: 38631 - protein, 11 aa, Artificial Sequence
  Peptide Derived from Human Papillomavirus
AVSHRPGKRPR

SEQ ID NO: 38632 - protein, 8 aa, Artificial Sequence
  Peptide Derived from Human Papillomavirus
CCRYRFQK

SEQ ID NO: 38633 - protein, 9 aa, Artificial Sequence
  Peptide Derived from Human Papillomavirus
CCRYRFQKY

SEQ ID NO: 38634 - protein, 10 aa, Artificial Sequence
  Peptide Derived from Human Papillomavirus
CCRYRFQKYK

SEQ ID NO: 38635 - protein, 8 aa, Artificial Sequence
  Peptide Derived from Human Papillomavirus
CFKKEGQH

SEQ ID NO: 38636 - protein, 8 aa, Artificial Sequence
  Peptide Derived from Human Papillomavirus
CLQVCKAK

SEQ ID NO: 38637 - protein, 9 aa, Artificial Sequence
  Peptide Derived from Human Papillomavirus
CLQVCKAKA

SEQ ID NO: 38638 - protein, 8 aa, Artificial Sequence
  Peptide Derived from Human Papillomavirus
CMQYVAWK

SEQ ID NO: 38639 - protein, 9 aa, Artificial Sequence
  Peptide Derived from Human Papillomavirus
CMQYVAWKY

SEQ ID NO: 38640 - protein, 11 aa, Artificial Sequence
  Peptide Derived from Human Papillomavirus
CMQYVAWKYIY

SEQ ID NO: 38641 - protein, 9 aa, Artificial Sequence
  Peptide Derived from Human Papillomavirus
CSAIEVQIA

SEQ ID NO: 38642 - protein, 10 aa, Artificial Sequence
  Peptide Derived from Human Papillomavirus
CSGVDYRGIY

SEQ ID NO: 38643 - protein, 11 aa, Artificial Sequence
  Peptide Derived from Human Papillomavirus
CSGVDYRGIYY

SEQ ID NO: 38644 - protein, 10 aa, Artificial Sequence
  Peptide Derived from Human Papillomavirus
DAAVSHRPGK

SEQ ID NO: 38645 - protein, 11 aa, Artificial Sequence
  Peptide Derived from Human Papillomavirus
DAAVSHRPGKR

SEQ ID NO: 38646 - protein, 8 aa, Artificial Sequence
  Peptide Derived from Human Papillomavirus
DFEQEAKK

SEQ ID NO: 38647 - protein, 9 aa, Artificial Sequence
  Peptide Derived from Human Papillomavirus
DFEQEAKKF

SEQ ID NO: 38648 - protein, 10 aa, Artificial Sequence
  Peptide Derived from Human Papillomavirus
DGHKTYYTDF

SEQ ID NO: 38649 - protein, 10 aa, Artificial Sequence
  Peptide Derived from Human Papillomavirus
DGSKNNCMQY

SEQ ID NO: 38650 - protein, 8 aa, Artificial Sequence
  Peptide Derived from Human Papillomavirus
DSSRESHA

SEQ ID NO: 38651 - protein, 9 aa, Artificial Sequence
  Peptide Derived from Human Papillomavirus
DSSRESHAK

SEQ ID NO: 38652 - protein, 8 aa, Artificial Sequence
  Peptide Derived from Human Papillomavirus
DSVSSTCR

SEQ ID NO: 38653 - protein, 9 aa, Artificial Sequence
  Peptide Derived from Human Papillomavirus
DSVSSTCRY

SEQ ID NO: 38654 - protein, 8 aa, Artificial Sequence
  Peptide Derived from Human Papillomavirus
DTDNTDSR

SEQ ID NO: 38655 - protein, 10 aa, Artificial Sequence
  Peptide Derived from Human Papillomavirus
DTDNTDSRSR

SEQ ID NO: 38656 - protein, 8 aa, Artificial Sequence
  Peptide Derived from Human Papillomavirus
EAKKFGCK

SEQ ID NO: 38657 - protein, 9 aa, Artificial Sequence
  Peptide Derived from Human Papillomavirus
EFDSSRESH

SEQ ID NO: 38658 - protein, 10 aa, Artificial Sequence
  Peptide Derived from Human Papillomavirus
EFDSSRESHA

SEQ ID NO: 38659 - protein, 11 aa, Artificial Sequence
  Peptide Derived from Human Papillomavirus
EFDSSRESHAK

SEQ ID NO: 38660 - protein, 9 aa, Artificial Sequence
  Peptide Derived from Human Papillomavirus
EGQHIEVWF

SEQ ID NO: 38661 - protein, 8 aa, Artificial Sequence
  Peptide Derived from Human Papillomavirus
ELWLTEPK

SEQ ID NO: 38662 - protein, 9 aa, Artificial Sequence
  Peptide Derived from Human Papillomavirus
ELWLTEPKK

SEQ ID NO: 38663 - protein, 11 aa, Artificial Sequence
  Peptide Derived from Human Papillomavirus
ELWLTEPKKCF

SEQ ID NO: 38664 - protein, 8 aa, Artificial Sequence
  Peptide Derived from Human Papillomavirus
ESEFDSSR

SEQ ID NO: 38665 - protein, 11 aa, Artificial Sequence
  Peptide Derived from Human Papillomavirus
ESEFDSSRESH

SEQ ID NO: 38666 - protein, 10 aa, Artificial Sequence
  Peptide Derived from Human Papillomavirus
ESHAKCVTTH

SEQ ID NO: 38667 - protein, 8 aa, Artificial Sequence
  Peptide Derived from Human Papillomavirus
ESLSTTIY

SEQ ID NO: 38668 - protein, 10 aa, Artificial Sequence
  Peptide Derived from Human Papillomavirus
ETQRNSFLSH

SEQ ID NO: 38669 - protein, 9 aa, Artificial Sequence
  Peptide Derived from Human Papillomavirus
ETVNEYNTH

SEQ ID NO: 38670 - protein, 10 aa, Artificial Sequence
  Peptide Derived from Human Papillomavirus
ETVNEYNTHK

SEQ ID NO: 38671 - protein, 10 aa, Artificial Sequence
  Peptide Derived from Human Papillomavirus
EVHMENESIY

SEQ ID NO: 38672 - protein, 8 aa, Artificial Sequence
  Peptide Derived from Human Papillomavirus
EVWFDGSK

SEQ ID NO: 38673 - protein, 11 aa, Artificial Sequence
  Peptide Derived from Human Papillomavirus
FDGSKNNCMQY

SEQ ID NO: 38674 - protein, 8 aa, Artificial Sequence
  Peptide Derived from Human Papillomavirus
FDSSRESH

SEQ ID NO: 38675 - protein, 9 aa, Artificial Sequence
  Peptide Derived from Human Papillomavirus
FDSSRESHA

SEQ ID NO: 38676 - protein, 10 aa, Artificial Sequence
  Peptide Derived from Human Papillomavirus
FDSSRESHAK

SEQ ID NO: 38677 - protein, 10 aa, Artificial Sequence
  Peptide Derived from Human Papillomavirus
FGCKNIWEVH

SEQ ID NO: 38678 - protein, 11 aa, Artificial Sequence
  Peptide Derived from Human Papillomavirus
FLSHVKIPVVY

SEQ ID NO: 38679 - protein, 8 aa, Artificial Sequence
  Peptide Derived from Human Papillomavirus
FVDVTSTY

SEQ ID NO: 38680 - protein, 9 aa, Artificial Sequence
  Peptide Derived from Human Papillomavirus
FVDVTSTYH

SEQ ID NO: 38681 - protein, 9 aa, Artificial Sequence
  Peptide Derived from Human Papillomavirus
GCKNIWEVH

SEQ ID NO: 38682 - protein, 9 aa, Artificial Sequence
  Peptide Derived from Human Papillomavirus
GDKTTPVVH

SEQ ID NO: 38683 - protein, 11 aa, Artificial Sequence
  Peptide Derived from Human Papillomavirus
GDKTTPVVHLK

SEQ ID NO: 38684 - protein, 9 aa, Artificial Sequence
  Peptide Derived from Human Papillomavirus
GIYYVHDGH

SEQ ID NO: 38685 - protein, 10 aa, Artificial Sequence
  Peptide Derived from Human Papillomavirus
GIYYVHDGHK

SEQ ID NO: 38686 - protein, 9 aa, Artificial Sequence
  Peptide Derived from Human Papillomavirus
GSKNNCMQY

SEQ ID NO: 38687 - protein, 11 aa, Artificial Sequence
  Peptide Derived from Human Papillomavirus
GSKNNCMQYVA

SEQ ID NO: 38688 - protein, 8 aa, Artificial Sequence
  Peptide Derived from Human Papillomavirus
GVDYRGIY

SEQ ID NO: 38689 - protein, 9 aa, Artificial Sequence
  Peptide Derived from Human Papillomavirus
GVDYRGIYY

SEQ ID NO: 38690 - protein, 11 aa, Artificial Sequence
  Peptide Derived from Human Papillomavirus
GVDYRGIYYVH

SEQ ID NO: 38691 - protein, 8 aa, Artificial Sequence
  Peptide Derived from Human Papillomavirus
HAKCVTTH

SEQ ID NO: 38692 - protein, 10 aa, Artificial Sequence
  Peptide Derived from Human Papillomavirus
HAKCVTTHTH

SEQ ID NO: 38693 - protein, 8 aa, Artificial Sequence
  Peptide Derived from Human Papillomavirus
HDGHKTYY

SEQ ID NO: 38694 - protein, 11 aa, Artificial Sequence
  Peptide Derived from Human Papillomavirus
HDGHKTYYTDF

SEQ ID NO: 38695 - protein, 10 aa, Artificial Sequence
  Peptide Derived from Human Papillomavirus
HIEVWFDGSK

SEQ ID NO: 38696 - protein, 11 aa, Artificial Sequence
  Peptide Derived from Human Papillomavirus
HISDTDNTDSR

SEQ ID NO: 38697 - protein, 8 aa, Artificial Sequence
  Peptide Derived from Human Papillomavirus
HLKGEPNR

SEQ ID NO: 38698 - protein, 10 aa, Artificial Sequence
  Peptide Derived from Human Papillomavirus
HLKGEPNRLK

SEQ ID NO: 38699 - protein, 8 aa, Artificial Sequence
  Peptide Derived from Human Papillomavirus
HMENESIY

SEQ ID NO: 38700 - protein, 8 aa, Artificial Sequence
  Peptide Derived from Human Papillomavirus
HVKIPVVY

SEQ ID NO: 38701 - protein, 9 aa, Artificial Sequence
  Peptide Derived from Human Papillomavirus
HVKIPVVYR

SEQ ID NO: 38702 - protein, 11 aa, Artificial Sequence
  Peptide Derived from Human Papillomavirus
IALESLSTTIY

SEQ ID NO: 38703 - protein, 9 aa, Artificial Sequence
  Peptide Derived from Human Papillomavirus
IIYKDETQR

SEQ ID NO: 38704 - protein, 10 aa, Artificial Sequence
  Peptide Derived from Human Papillomavirus
ISDTDNTDSR

SEQ ID NO: 38705 - protein, 11 aa, Artificial Sequence
  Peptide Derived from Human Papillomavirus
ITIIYKDETQR

SEQ ID NO: 38706 - protein, 11 aa, Artificial Sequence
  Peptide Derived from Human Papillomavirus
KACSAIEVQIA

SEQ ID NO: 38707 - protein, 9 aa, Artificial Sequence
  Peptide Derived from Human Papillomavirus
KCCRYRFQK

SEQ ID NO: 38708 - protein, 10 aa, Artificial Sequence
  Peptide Derived from Human Papillomavirus
KCCRYRFQKY

SEQ ID NO: 38709 - protein, 11 aa, Artificial Sequence
  Peptide Derived from Human Papillomavirus
KCCRYRFQKYK

SEQ ID NO: 38710 - protein, 9 aa, Artificial Sequence
  Peptide Derived from Human Papillomavirus
KCFKKEGQH

SEQ ID NO: 38711 - protein, 8 aa, Artificial Sequence
  Peptide Derived from Human Papillomavirus
KCVTTHTH

SEQ ID NO: 38712 - protein, 9 aa, Artificial Sequence
  Peptide Derived from Human Papillomavirus
KDETQRNSF

SEQ ID NO: 38713 - protein, 11 aa, Artificial Sequence
  Peptide Derived from Human Papillomavirus
KFGCKNIWEVH

SEQ ID NO: 38714 - protein, 8 aa, Artificial Sequence
  Peptide Derived from Human Papillomavirus
KGEPNRLK

SEQ ID NO: 38715 - protein, 11 aa, Artificial Sequence
  Peptide Derived from Human Papillomavirus
KGEPNRLKCCR

SEQ ID NO: 38716 - protein, 11 aa, Artificial Sequence
  Peptide Derived from Human Papillomavirus
KTLFVDVTSTY

SEQ ID NO: 38717 - protein, 9 aa, Artificial Sequence
  Peptide Derived from Human Papillomavirus
KTTPVVHLK

SEQ ID NO: 38718 - protein, 11 aa, Artificial Sequence
  Peptide Derived from Human Papillomavirus
KTYYTDFEQEA

SEQ ID NO: 38719 - protein, 8 aa, Artificial Sequence
  Peptide Derived from Human Papillomavirus
KVCSGVDY

SEQ ID NO: 38720 - protein, 9 aa, Artificial Sequence
  Peptide Derived from Human Papillomavirus
KVCSGVDYR

SEQ ID NO: 38721 - protein, 9 aa, Artificial Sequence
  Peptide Derived from Human Papillomavirus
LFVDVTSTY

SEQ ID NO: 38722 - protein, 10 aa, Artificial Sequence
  Peptide Derived from Human Papillomavirus
LFVDVTSTYH

SEQ ID NO: 38723 - protein, 10 aa, Artificial Sequence
  Peptide Derived from Human Papillomavirus
LSHVKIPVVY

SEQ ID NO: 38724 - protein, 11 aa, Artificial Sequence
  Peptide Derived from Human Papillomavirus
LSHVKIPVVYR

SEQ ID NO: 38725 - protein, 8 aa, Artificial Sequence
  Peptide Derived from Human Papillomavirus
LTEPKKCF

SEQ ID NO: 38726 - protein, 9 aa, Artificial Sequence
  Peptide Derived from Human Papillomavirus
LTEPKKCFK

SEQ ID NO: 38727 - protein, 10 aa, Artificial Sequence
  Peptide Derived from Human Papillomavirus
LTEPKKCFKK

SEQ ID NO: 38728 - protein, 9 aa, Artificial Sequence
  Peptide Derived from Human Papillomavirus
MVPCLQVCK

SEQ ID NO: 38729 - protein, 10 aa, Artificial Sequence
  Peptide Derived from Human Papillomavirus
MVPCLQVCKA

SEQ ID NO: 38730 - protein, 11 aa, Artificial Sequence
  Peptide Derived from Human Papillomavirus
MVPCLQVCKAK

SEQ ID NO: 38731 - protein, 9 aa, Artificial Sequence
  Peptide Derived from Human Papillomavirus
NCMQYVAWK

SEQ ID NO: 38732 - protein, 10 aa, Artificial Sequence
  Peptide Derived from Human Papillomavirus
NCMQYVAWKY

SEQ ID NO: 38733 - protein, 8 aa, Artificial Sequence
  Peptide Derived from Human Papillomavirus
NGDCGWQK

SEQ ID NO: 38734 - protein, 8 aa, Artificial Sequence
  Peptide Derived from Human Papillomavirus
NSFLSHVK

SEQ ID NO: 38735 - protein, 11 aa, Artificial Sequence
  Peptide Derived from Human Papillomavirus
NVSPVETVNEY

SEQ ID NO: 38736 - protein, 8 aa, Artificial Sequence
  Peptide Derived from Human Papillomavirus
PCLQVCKA

SEQ ID NO: 38737 - protein, 9 aa, Artificial Sequence
  Peptide Derived from Human Papillomavirus
PCLQVCKAK

SEQ ID NO: 38738 - protein, 10 aa, Artificial Sequence
  Peptide Derived from Human Papillomavirus
PCLQVCKAKA

SEQ ID NO: 38739 - protein, 9 aa, Artificial Sequence
  Peptide Derived from Human Papillomavirus
PDSVSSTCR

SEQ ID NO: 38740 - protein, 10 aa, Artificial Sequence
  Peptide Derived from Human Papillomavirus
PDSVSSTCRY

SEQ ID NO: 38741 - protein, 10 aa, Artificial Sequence
  Peptide Derived from Human Papillomavirus
PGDKTTPVVH

SEQ ID NO: 38742 - protein, 8 aa, Artificial Sequence
  Peptide Derived from Human Papillomavirus
PGKRPRLR

SEQ ID NO: 38743 - protein, 8 aa, Artificial Sequence
  Peptide Derived from Human Papillomavirus
PVETVNEY

SEQ ID NO: 38744 - protein, 11 aa, Artificial Sequence
  Peptide Derived from Human Papillomavirus
PVETVNEYNTH

SEQ ID NO: 38745 - protein, 11 aa, Artificial Sequence
  Peptide Derived from Human Papillomavirus
PVVHLKGEPNR

SEQ ID NO: 38746 - protein, 10 aa, Artificial Sequence
  Peptide Derived from Human Papillomavirus
PVVYRLVWDK

SEQ ID NO: 38747 - protein, 8 aa, Artificial Sequence
  Peptide Derived from Human Papillomavirus
QDAAVSHR

SEQ ID NO: 38748 - protein, 11 aa, Artificial Sequence
  Peptide Derived from Human Papillomavirus
QDAAVSHRPGK

SEQ ID NO: 38749 - protein, 10 aa, Artificial Sequence
  Peptide Derived from Human Papillomavirus
QVCKAKACSA

SEQ ID NO: 38750 - protein, 9 aa, Artificial Sequence
  Peptide Derived from Human Papillomavirus
RFQKYKTLF

SEQ ID NO: 38751 - protein, 10 aa, Artificial Sequence
  Peptide Derived from Human Papillomavirus
RGIYYVHDGH

SEQ ID NO: 38752 - protein, 11 aa, Artificial Sequence
  Peptide Derived from Human Papillomavirus
RGIYYVHDGHK

SEQ ID NO: 38753 - protein, 8 aa, Artificial Sequence
  Peptide Derived from Human Papillomavirus
RLKCCRYR

SEQ ID NO: 38754 - protein, 9 aa, Artificial Sequence
  Peptide Derived from Human Papillomavirus
RLKCCRYRF

SEQ ID NO: 38755 - protein, 11 aa, Artificial Sequence
  Peptide Derived from Human Papillomavirus
RLKCCRYRFQK

SEQ ID NO: 38756 - protein, 11 aa, Artificial Sequence
  Peptide Derived from Human Papillomavirus
RLRESEFDSSR

SEQ ID NO: 38757 - protein, 8 aa, Artificial Sequence
  Peptide Derived from Human Papillomavirus
RSINNNNH

SEQ ID NO: 38758 - protein, 10 aa, Artificial Sequence
  Peptide Derived from Human Papillomavirus
RSRSINNNNH

SEQ ID NO: 38759 - protein, 8 aa, Artificial Sequence
  Peptide Derived from Human Papillomavirus
SAIEVQIA

SEQ ID NO: 38760 - protein, 9 aa, Artificial Sequence
  Peptide Derived from Human Papillomavirus
SDTDNTDSR

SEQ ID NO: 38761 - protein, 11 aa, Artificial Sequence
  Peptide Derived from Human Papillomavirus
SDTDNTDSRSR

SEQ ID NO: 38762 - protein, 9 aa, Artificial Sequence
  Peptide Derived from Human Papillomavirus
SGVDYRGIY

SEQ ID NO: 38763 - protein, 10 aa, Artificial Sequence
  Peptide Derived from Human Papillomavirus
SGVDYRGIYY

SEQ ID NO: 38764 - protein, 8 aa, Artificial Sequence
  Peptide Derived from Human Papillomavirus
SIITIIYK

SEQ ID NO: 38765 - protein, 11 aa, Artificial Sequence
  Peptide Derived from Human Papillomavirus
SINNNNHPGDK

SEQ ID NO: 38766 - protein, 8 aa, Artificial Sequence
  Peptide Derived from Human Papillomavirus
SSRESHAK

SEQ ID NO: 38767 - protein, 9 aa, Artificial Sequence
  Peptide Derived from Human Papillomavirus
STSVGNQDA

SEQ ID NO: 38768 - protein, 10 aa, Artificial Sequence
  Peptide Derived from Human Papillomavirus
STSVGNQDAA

SEQ ID NO: 38769 - protein, 11 aa, Artificial Sequence
  Peptide Derived from Human Papillomavirus
STYHWTSTDNK

SEQ ID NO: 38770 - protein, 8 aa, Artificial Sequence
  Peptide Derived from Human Papillomavirus
SVGNQDAA

SEQ ID NO: 38771 - protein, 11 aa, Artificial Sequence
  Peptide Derived from Human Papillomavirus
SVGNQDAAVSH

SEQ ID NO: 38772 - protein, 8 aa, Artificial Sequence
  Peptide Derived from Human Papillomavirus
SVSSTCRY

SEQ ID NO: 38773 - protein, 11 aa, Artificial Sequence
  Peptide Derived from Human Papillomavirus
TCEELWLTEPK

SEQ ID NO: 38774 - protein, 8 aa, Artificial Sequence
  Peptide Derived from Human Papillomavirus
TDFEQEAK

SEQ ID NO: 38775 - protein, 9 aa, Artificial Sequence
  Peptide Derived from Human Papillomavirus
TDFEQEAKK

SEQ ID NO: 38776 - protein, 10 aa, Artificial Sequence
  Peptide Derived from Human Papillomavirus
TDFEQEAKKF

SEQ ID NO: 38777 - protein, 9 aa, Artificial Sequence
  Peptide Derived from Human Papillomavirus
TDNTDSRSR

SEQ ID NO: 38778 - protein, 10 aa, Artificial Sequence
  Peptide Derived from Human Papillomavirus
TIIYKDETQR

SEQ ID NO: 38779 - protein, 11 aa, Artificial Sequence
  Peptide Derived from Human Papillomavirus
TIYNNEEWTLR

SEQ ID NO: 38780 - protein, 10 aa, Artificial Sequence
  Peptide Derived from Human Papillomavirus
TLFVDVTSTY

SEQ ID NO: 38781 - protein, 11 aa, Artificial Sequence
  Peptide Derived from Human Papillomavirus
TLFVDVTSTYH

SEQ ID NO: 38782 - protein, 8 aa, Artificial Sequence
  Peptide Derived from Human Papillomavirus
TSTDNKNY

SEQ ID NO: 38783 - protein, 10 aa, Artificial Sequence
  Peptide Derived from Human Papillomavirus
TSTSVGNQDA

SEQ ID NO: 38784 - protein, 11 aa, Artificial Sequence
  Peptide Derived from Human Papillomavirus
TSTSVGNQDAA

SEQ ID NO: 38785 - protein, 8 aa, Artificial Sequence
  Peptide Derived from Human Papillomavirus
TSVGNQDA

SEQ ID NO: 38786 - protein, 9 aa, Artificial Sequence
  Peptide Derived from Human Papillomavirus
TSVGNQDAA

SEQ ID NO: 38787 - protein, 8 aa, Artificial Sequence
  Peptide Derived from Human Papillomavirus
TTPVVHLK

SEQ ID NO: 38788 - protein, 11 aa, Artificial Sequence
  Peptide Derived from Human Papillomavirus
TTSTSVGNQDA

SEQ ID NO: 38789 - protein, 8 aa, Artificial Sequence
  Peptide Derived from Human Papillomavirus
TVNEYNTH

SEQ ID NO: 38790 - protein, 9 aa, Artificial Sequence
  Peptide Derived from Human Papillomavirus
TVNEYNTHK

SEQ ID NO: 38791 - protein, 8 aa, Artificial Sequence
  Peptide Derived from Human Papillomavirus
VAWKYIYY

SEQ ID NO: 38792 - protein, 9 aa, Artificial Sequence
  Peptide Derived from Human Papillomavirus
VCKAKACSA

SEQ ID NO: 38793 - protein, 8 aa, Artificial Sequence
  Peptide Derived from Human Papillomavirus
VCSGVDYR

SEQ ID NO: 38794 - protein, 11 aa, Artificial Sequence
  Peptide Derived from Human Papillomavirus
VCSGVDYRGIY

SEQ ID NO: 38795 - protein, 8 aa, Artificial Sequence
  Peptide Derived from Human Papillomavirus
VDVTSTYH

SEQ ID NO: 38796 - protein, 8 aa, Artificial Sequence
  Peptide Derived from Human Papillomavirus
VDYRGIYY

SEQ ID NO: 38797 - protein, 10 aa, Artificial Sequence
  Peptide Derived from Human Papillomavirus
VDYRGIYYVH

SEQ ID NO: 38798 - protein, 10 aa, Artificial Sequence
  Peptide Derived from Human Papillomavirus
VGNQDAAVSH

SEQ ID NO: 38799 - protein, 11 aa, Artificial Sequence
  Peptide Derived from Human Papillomavirus
VGNQDAAVSHR

SEQ ID NO: 38800 - protein, 8 aa, Artificial Sequence
  Peptide Derived from Human Papillomavirus
VSHRPGKR

SEQ ID NO: 38801 - protein, 10 aa, Artificial Sequence
  Peptide Derived from Human Papillomavirus
VSHRPGKRPR

SEQ ID NO: 38802 - protein, 10 aa, Artificial Sequence
  Peptide Derived from Human Papillomavirus
VSPVETVNEY

SEQ ID NO: 38803 - protein, 10 aa, Artificial Sequence
  Peptide Derived from Human Papillomavirus
VVHLKGEPNR

SEQ ID NO: 38804 - protein, 9 aa, Artificial Sequence
  Peptide Derived from Human Papillomavirus
VVYRLVWDK

SEQ ID NO: 38805 - protein, 9 aa, Artificial Sequence
  Peptide Derived from Human Papillomavirus
WLTEPKKCF

SEQ ID NO: 38806 - protein, 10 aa, Artificial Sequence
  Peptide Derived from Human Papillomavirus
WLTEPKKCFK

SEQ ID NO: 38807 - protein, 11 aa, Artificial Sequence
  Peptide Derived from Human Papillomavirus
WLTEPKKCFKK

SEQ ID NO: 38808 - protein, 9 aa, Artificial Sequence
  Peptide Derived from Human Papillomavirus
WTSTDNKNY

SEQ ID NO: 38809 - protein, 11 aa, Artificial Sequence
  Peptide Derived from Human Papillomavirus
YCPDSVSSTCR

SEQ ID NO: 38810 - protein, 8 aa, Artificial Sequence
  Peptide Derived from Human Papillomavirus
YSIITIIY

SEQ ID NO: 38811 - protein, 9 aa, Artificial Sequence
  Peptide Derived from Human Papillomavirus
YSIITIIYK

SEQ ID NO: 38812 - protein, 8 aa, Artificial Sequence
  Peptide Derived from Human Papillomavirus
YTDFEQEA

SEQ ID NO: 38813 - protein, 9 aa, Artificial Sequence
  Peptide Derived from Human Papillomavirus
YTDFEQEAK

SEQ ID NO: 38814 - protein, 10 aa, Artificial Sequence
  Peptide Derived from Human Papillomavirus
YTDFEQEAKK

SEQ ID NO: 38815 - protein, 11 aa, Artificial Sequence
  Peptide Derived from Human Papillomavirus
YTDFEQEAKKF

SEQ ID NO: 38816 - protein, 8 aa, Artificial Sequence
  Peptide Derived from Human Papillomavirus
YVAWKYIY

SEQ ID NO: 38817 - protein, 9 aa, Artificial Sequence
  Peptide Derived from Human Papillomavirus
YVAWKYIYY

SEQ ID NO: 38818 - protein, 9 aa, Artificial Sequence
  Peptide Derived from Human Papillomavirus
YVHDGHKTY

SEQ ID NO: 38819 - protein, 10 aa, Artificial Sequence
  Peptide Derived from Human Papillomavirus
YVHDGHKTYY

SEQ ID NO: 38820 - protein, 9 aa, Artificial Sequence
  Peptide Derived from Human Papillomavirus
ACTELKLVY

SEQ ID NO: 38821 - protein, 10 aa, Artificial Sequence
  Peptide Derived from Human Papillomavirus
ACTELKLVYR

SEQ ID NO: 38822 - protein, 8 aa, Artificial Sequence
  Peptide Derived from Human Papillomavirus
ATLESITK

SEQ ID NO: 38823 - protein, 9 aa, Artificial Sequence
  Peptide Derived from Human Papillomavirus
ATLESITKK

SEQ ID NO: 38824 - protein, 9 aa, Artificial Sequence
  Peptide Derived from Human Papillomavirus
AVCRVCLLF

SEQ ID NO: 38825 - protein, 10 aa, Artificial Sequence
  Peptide Derived from Human Papillomavirus
AVCRVCLLFY

SEQ ID NO: 38826 - protein, 8 aa, Artificial Sequence
  Peptide Derived from Human Papillomavirus
CDLLIRCY

SEQ ID NO: 38827 - protein, 9 aa, Artificial Sequence
  Peptide Derived from Human Papillomavirus
CDLLIRCYR

SEQ ID NO: 38828 - protein, 8 aa, Artificial Sequence
  Peptide Derived from Human Papillomavirus
CDRKRRFH

SEQ ID NO: 38829 - protein, 11 aa, Artificial Sequence
  Peptide Derived from Human Papillomavirus
CDRKRRFHLIA

SEQ ID NO: 38830 - protein, 10 aa, Artificial Sequence
  Peptide Derived from Human Papillomavirus
CLGCWRQTSR

SEQ ID NO: 38831 - protein, 9 aa, Artificial Sequence
  Peptide Derived from Human Papillomavirus
CLLFYSKVR

SEQ ID NO: 38832 - protein, 10 aa, Artificial Sequence
  Peptide Derived from Human Papillomavirus
CLLFYSKVRK

SEQ ID NO: 38833 - protein, 11 aa, Artificial Sequence
  Peptide Derived from Human Papillomavirus
CLLFYSKVRKY

SEQ ID NO: 38834 - protein, 8 aa, Artificial Sequence
  Peptide Derived from Human Papillomavirus
CTELKLVY

SEQ ID NO: 38835 - protein, 9 aa, Artificial Sequence
  Peptide Derived from Human Papillomavirus
CTELKLVYR

SEQ ID NO: 38836 - protein, 10 aa, Artificial Sequence
  Peptide Derived from Human Papillomavirus
CVYCKKELTR

SEQ ID NO: 38837 - protein, 11 aa, Artificial Sequence
  Peptide Derived from Human Papillomavirus
CVYCKKELTRA

SEQ ID NO: 38838 - protein, 9 aa, Artificial Sequence
  Peptide Derived from Human Papillomavirus
DDFPYAVCR

SEQ ID NO: 38839 - protein, 8 aa, Artificial Sequence
  Peptide Derived from Human Papillomavirus
DFPYAVCR

SEQ ID NO: 38840 - protein, 8 aa, Artificial Sequence
  Peptide Derived from Human Papillomavirus
DLLIRCYR

SEQ ID NO: 38841 - protein, 8 aa, Artificial Sequence
  Peptide Derived from Human Papillomavirus
DLRLSCVY

SEQ ID NO: 38842 - protein, 10 aa, Artificial Sequence
  Peptide Derived from Human Papillomavirus
DLRLSCVYCK

SEQ ID NO: 38843 - protein, 11 aa, Artificial Sequence
  Peptide Derived from Human Papillomavirus
DLRLSCVYCKK

SEQ ID NO: 38844 - protein, 8 aa, Artificial Sequence
  Peptide Derived from Human Papillomavirus
EIPLIDLR

SEQ ID NO: 38845 - protein, 10 aa, Artificial Sequence
  Peptide Derived from Human Papillomavirus
ELKLVYRDDF

SEQ ID NO: 38846 - protein, 8 aa, Artificial Sequence
  Peptide Derived from Human Papillomavirus
ELTRAEVY

SEQ ID NO: 38847 - protein, 10 aa, Artificial Sequence
  Peptide Derived from Human Papillomavirus
ELTRAEVYNF

SEQ ID NO: 38848 - protein, 11 aa, Artificial Sequence
  Peptide Derived from Human Papillomavirus
ELTRAEVYNFA

SEQ ID NO: 38849 - protein, 11 aa, Artificial Sequence
  Peptide Derived from Human Papillomavirus
EVLEIPLIDLR

SEQ ID NO: 38850 - protein, 11 aa, Artificial Sequence
  Peptide Derived from Human Papillomavirus
EVYNFACTELK

SEQ ID NO: 38851 - protein, 10 aa, Artificial Sequence
  Peptide Derived from Human Papillomavirus
FACTELKLVY

SEQ ID NO: 38852 - protein, 11 aa, Artificial Sequence
  Peptide Derived from Human Papillomavirus
FACTELKLVYR

SEQ ID NO: 38853 - protein, 9 aa, Artificial Sequence
  Peptide Derived from Human Papillomavirus
GATLESITK

SEQ ID NO: 38854 - protein, 10 aa, Artificial Sequence
  Peptide Derived from Human Papillomavirus
GATLESITKK

SEQ ID NO: 38855 - protein, 8 aa, Artificial Sequence
  Peptide Derived from Human Papillomavirus
GCWRQTSR

SEQ ID NO: 38856 - protein, 11 aa, Artificial Sequence
  Peptide Derived from Human Papillomavirus
GCWRQTSREPR

SEQ ID NO: 38857 - protein, 8 aa, Artificial Sequence
  Peptide Derived from Human Papillomavirus
GSCLGCWR

SEQ ID NO: 38858 - protein, 8 aa, Artificial Sequence
  Peptide Derived from Human Papillomavirus
HCDRKRRF

SEQ ID NO: 38859 - protein, 9 aa, Artificial Sequence
  Peptide Derived from Human Papillomavirus
HCDRKRRFH

SEQ ID NO: 38860 - protein, 9 aa, Artificial Sequence
  Peptide Derived from Human Papillomavirus
IDLRLSCVY

SEQ ID NO: 38861 - protein, 11 aa, Artificial Sequence
  Peptide Derived from Human Papillomavirus
IDLRLSCVYCK

SEQ ID NO: 38862 - protein, 8 aa, Artificial Sequence
  Peptide Derived from Human Papillomavirus
KLVYRDDF

SEQ ID NO: 38863 - protein, 10 aa, Artificial Sequence
  Peptide Derived from Human Papillomavirus
KLVYRDDFPY

SEQ ID NO: 38864 - protein, 11 aa, Artificial Sequence
  Peptide Derived from Human Papillomavirus
KLVYRDDFPYA

SEQ ID NO: 38865 - protein, 8 aa, Artificial Sequence
  Peptide Derived from Human Papillomavirus
KVRKYRYY

SEQ ID NO: 38866 - protein, 10 aa, Artificial Sequence
  Peptide Derived from Human Papillomavirus
KVRKYRYYDY

SEQ ID NO: 38867 - protein, 9 aa, Artificial Sequence
  Peptide Derived from Human Papillomavirus
LCDLLIRCY

SEQ ID NO: 38868 - protein, 10 aa, Artificial Sequence
  Peptide Derived from Human Papillomavirus
LCDLLIRCYR

SEQ ID NO: 38869 - protein, 8 aa, Artificial Sequence
  Peptide Derived from Human Papillomavirus
LFYSKVRK

SEQ ID NO: 38870 - protein, 9 aa, Artificial Sequence
  Peptide Derived from Human Papillomavirus
LFYSKVRKY

SEQ ID NO: 38871 - protein, 10 aa, Artificial Sequence
  Peptide Derived from Human Papillomavirus
LFYSKVRKYR

SEQ ID NO: 38872 - protein, 11 aa, Artificial Sequence
  Peptide Derived from Human Papillomavirus
LFYSKVRKYRY

SEQ ID NO: 38873 - protein, 9 aa, Artificial Sequence
  Peptide Derived from Human Papillomavirus
LGCWRQTSR

SEQ ID NO: 38874 - protein, 10 aa, Artificial Sequence
  Peptide Derived from Human Papillomavirus
LIDLRLSCVY

SEQ ID NO: 38875 - protein, 8 aa, Artificial Sequence
  Peptide Derived from Human Papillomavirus
LLFYSKVR

SEQ ID NO: 38876 - protein, 9 aa, Artificial Sequence
  Peptide Derived from Human Papillomavirus
LLFYSKVRK

SEQ ID NO: 38877 - protein, 10 aa, Artificial Sequence
  Peptide Derived from Human Papillomavirus
LLFYSKVRKY

SEQ ID NO: 38878 - protein, 11 aa, Artificial Sequence
  Peptide Derived from Human Papillomavirus
LLFYSKVRKYR

SEQ ID NO: 38879 - protein, 8 aa, Artificial Sequence
  Peptide Derived from Human Papillomavirus
LSCVYCKK

SEQ ID NO: 38880 - protein, 9 aa, Artificial Sequence
  Peptide Derived from Human Papillomavirus
LTPEEKQLH

SEQ ID NO: 38881 - protein, 9 aa, Artificial Sequence
  Peptide Derived from Human Papillomavirus
LTRAEVYNF

SEQ ID NO: 38882 - protein, 10 aa, Artificial Sequence
  Peptide Derived from Human Papillomavirus
LTRAEVYNFA

SEQ ID NO: 38883 - protein, 9 aa, Artificial Sequence
  Peptide Derived from Human Papillomavirus
LVYRDDFPY

SEQ ID NO: 38884 - protein, 10 aa, Artificial Sequence
  Peptide Derived from Human Papillomavirus
LVYRDDFPYA

SEQ ID NO: 38885 - protein, 8 aa, Artificial Sequence
  Peptide Derived from Human Papillomavirus
NFACTELK

SEQ ID NO: 38886 - protein, 11 aa, Artificial Sequence
  Peptide Derived from Human Papillomavirus
NFACTELKLVY

SEQ ID NO: 38887 - protein, 11 aa, Artificial Sequence
  Peptide Derived from Human Papillomavirus
PLIDLRLSCVY

SEQ ID NO: 38888 - protein, 10 aa, Artificial Sequence
  Peptide Derived from Human Papillomavirus
PLTPEEKQLH

SEQ ID NO: 38889 - protein, 8 aa, Artificial Sequence
  Peptide Derived from Human Papillomavirus
QFNNPQER

SEQ ID NO: 38890 - protein, 10 aa, Artificial Sequence
  Peptide Derived from Human Papillomavirus
QFNNPQERPR

SEQ ID NO: 38891 - protein, 8 aa, Artificial Sequence
  Peptide Derived from Human Papillomavirus
QLCDLLIR

SEQ ID NO: 38892 - protein, 10 aa, Artificial Sequence
  Peptide Derived from Human Papillomavirus
QLCDLLIRCY

SEQ ID NO: 38893 - protein, 11 aa, Artificial Sequence
  Peptide Derived from Human Papillomavirus
QLCDLLIRCYR

SEQ ID NO: 38894 - protein, 8 aa, Artificial Sequence
  Peptide Derived from Human Papillomavirus
QLHCDRKR

SEQ ID NO: 38895 - protein, 9 aa, Artificial Sequence
  Peptide Derived from Human Papillomavirus
QLHCDRKRR

SEQ ID NO: 38896 - protein, 10 aa, Artificial Sequence
  Peptide Derived from Human Papillomavirus
QLHCDRKRRF

SEQ ID NO: 38897 - protein, 11 aa, Artificial Sequence
  Peptide Derived from Human Papillomavirus
QLHCDRKRRFH

SEQ ID NO: 38898 - protein, 9 aa, Artificial Sequence
  Peptide Derived from Human Papillomavirus
QSPLTPEEK

SEQ ID NO: 38899 - protein, 8 aa, Artificial Sequence
  Peptide Derived from Human Papillomavirus
RAEVYNFA

SEQ ID NO: 38900 - protein, 11 aa, Artificial Sequence
  Peptide Derived from Human Papillomavirus
RCQSPLTPEEK

SEQ ID NO: 38901 - protein, 10 aa, Artificial Sequence
  Peptide Derived from Human Papillomavirus
RDDFPYAVCR

SEQ ID NO: 38902 - protein, 8 aa, Artificial Sequence
  Peptide Derived from Human Papillomavirus
RLSCVYCK

SEQ ID NO: 38903 - protein, 9 aa, Artificial Sequence
  Peptide Derived from Human Papillomavirus
RLSCVYCKK

SEQ ID NO: 38904 - protein, 9 aa, Artificial Sequence
  Peptide Derived from Human Papillomavirus
RVCLLFYSK

SEQ ID NO: 38905 - protein, 11 aa, Artificial Sequence
  Peptide Derived from Human Papillomavirus
RVCLLFYSKVR

SEQ ID NO: 38906 - protein, 11 aa, Artificial Sequence
  Peptide Derived from Human Papillomavirus
SCLGCWRQTSR

SEQ ID NO: 38907 - protein, 11 aa, Artificial Sequence
  Peptide Derived from Human Papillomavirus
SCVYCKKELTR

SEQ ID NO: 38908 - protein, 9 aa, Artificial Sequence
  Peptide Derived from Human Papillomavirus
TGSCLGCWR

SEQ ID NO: 38909 - protein, 8 aa, Artificial Sequence
  Peptide Derived from Human Papillomavirus
TLESITKK

SEQ ID NO: 38910 - protein, 8 aa, Artificial Sequence
  Peptide Derived from Human Papillomavirus
VCLLFYSK

SEQ ID NO: 38911 - protein, 10 aa, Artificial Sequence
  Peptide Derived from Human Papillomavirus
VCLLFYSKVR

SEQ ID NO: 38912 - protein, 11 aa, Artificial Sequence
  Peptide Derived from Human Papillomavirus
VCLLFYSKVRK

SEQ ID NO: 38913 - protein, 8 aa, Artificial Sequence
  Peptide Derived from Human Papillomavirus
VCRVCLLF

SEQ ID NO: 38914 - protein, 9 aa, Artificial Sequence
  Peptide Derived from Human Papillomavirus
VCRVCLLFY

SEQ ID NO: 38915 - protein, 11 aa, Artificial Sequence
  Peptide Derived from Human Papillomavirus
VCRVCLLFYSK

SEQ ID NO: 38916 - protein, 10 aa, Artificial Sequence
  Peptide Derived from Human Papillomavirus
VLEIPLIDLR

SEQ ID NO: 38917 - protein, 10 aa, Artificial Sequence
  Peptide Derived from Human Papillomavirus
WTGSCLGCWR

SEQ ID NO: 38918 - protein, 10 aa, Artificial Sequence
  Peptide Derived from Human Papillomavirus
YAVCRVCLLF

SEQ ID NO: 38919 - protein, 11 aa, Artificial Sequence
  Peptide Derived from Human Papillomavirus
YAVCRVCLLFY

SEQ ID NO: 38920 - protein, 8 aa, Artificial Sequence
  Peptide Derived from Human Papillomavirus
YCKKELTR

SEQ ID NO: 38921 - protein, 9 aa, Artificial Sequence
  Peptide Derived from Human Papillomavirus
YCKKELTRA

SEQ ID NO: 38922 - protein, 8 aa, Artificial Sequence
  Peptide Derived from Human Papillomavirus
YDYSVYGA

SEQ ID NO: 38923 - protein, 10 aa, Artificial Sequence
  Peptide Derived from Human Papillomavirus
YGATLESITK

SEQ ID NO: 38924 - protein, 11 aa, Artificial Sequence
  Peptide Derived from Human Papillomavirus
YGATLESITKK

SEQ ID NO: 38925 - protein, 8 aa, Artificial Sequence
  Peptide Derived from Human Papillomavirus
YSKVRKYR

SEQ ID NO: 38926 - protein, 9 aa, Artificial Sequence
  Peptide Derived from Human Papillomavirus
YSKVRKYRY

SEQ ID NO: 38927 - protein, 10 aa, Artificial Sequence
  Peptide Derived from Human Papillomavirus
YSKVRKYRYY

SEQ ID NO: 38928 - protein, 10 aa, Artificial Sequence
  Peptide Derived from Human Papillomavirus
ALTVTCPLCA

SEQ ID NO: 38929 - protein, 10 aa, Artificial Sequence
  Peptide Derived from Human Papillomavirus
DIQSTKEDLR

SEQ ID NO: 38930 - protein, 10 aa, Artificial Sequence
  Peptide Derived from Human Papillomavirus
EDEDEDEVDH

SEQ ID NO: 38931 - protein, 8 aa, Artificial Sequence
  Peptide Derived from Human Papillomavirus
EDEDEVDH

SEQ ID NO: 38932 - protein, 10 aa, Artificial Sequence
  Peptide Derived from Human Papillomavirus
EDEVDHLQER

SEQ ID NO: 38933 - protein, 8 aa, Artificial Sequence
  Peptide Derived from Human Papillomavirus
EVDHLQER

SEQ ID NO: 38934 - protein, 11 aa, Artificial Sequence
  Peptide Derived from Human Papillomavirus
FVVQLDIQSTK

SEQ ID NO: 38935 - protein, 11 aa, Artificial Sequence
  Peptide Derived from Human Papillomavirus
GALTVTCPLCA

SEQ ID NO: 38936 - protein, 9 aa, Artificial Sequence
  Peptide Derived from Human Papillomavirus
HLQERPQQA

SEQ ID NO: 38937 - protein, 10 aa, Artificial Sequence
  Peptide Derived from Human Papillomavirus
HLQERPQQAR

SEQ ID NO: 38938 - protein, 8 aa, Artificial Sequence
  Peptide Derived from Human Papillomavirus
HVPCCECK

SEQ ID NO: 38939 - protein, 9 aa, Artificial Sequence
  Peptide Derived from Human Papillomavirus
HVPCCECKF

SEQ ID NO: 38940 - protein, 11 aa, Artificial Sequence
  Peptide Derived from Human Papillomavirus
LDIQSTKEDLR

SEQ ID NO: 38941 - protein, 10 aa, Artificial Sequence
  Peptide Derived from Human Papillomavirus
LIHVPCCECK

SEQ ID NO: 38942 - protein, 11 aa, Artificial Sequence
  Peptide Derived from Human Papillomavirus
LIHVPCCECKF

SEQ ID NO: 38943 - protein, 9 aa, Artificial Sequence
  Peptide Derived from Human Papillomavirus
LTVTCPLCA

SEQ ID NO: 38944 - protein, 8 aa, Artificial Sequence
  Peptide Derived from Human Papillomavirus
QAKQHTCY

SEQ ID NO: 38945 - protein, 11 aa, Artificial Sequence
  Peptide Derived from Human Papillomavirus
QAKQHTCYLIH

SEQ ID NO: 38946 - protein, 8 aa, Artificial Sequence
  Peptide Derived from Human Papillomavirus
QARQAKQH

SEQ ID NO: 38947 - protein, 11 aa, Artificial Sequence
  Peptide Derived from Human Papillomavirus
QARQAKQHTCY

SEQ ID NO: 38948 - protein, 8 aa, Artificial Sequence
  Peptide Derived from Human Papillomavirus
QLDIQSTK

SEQ ID NO: 38949 - protein, 8 aa, Artificial Sequence
  Peptide Derived from Human Papillomavirus
QSTKEDLR

SEQ ID NO: 38950 - protein, 10 aa, Artificial Sequence
  Peptide Derived from Human Papillomavirus
RVVQQLLMGA

SEQ ID NO: 38951 - protein, 8 aa, Artificial Sequence
  Peptide Derived from Human Papillomavirus
TVTCPLCA

SEQ ID NO: 38952 - protein, 11 aa, Artificial Sequence
  Peptide Derived from Human Papillomavirus
VDHLQERPQQA

SEQ ID NO: 38953 - protein, 10 aa, Artificial Sequence
  Peptide Derived from Human Papillomavirus
VVQLDIQSTK

SEQ ID NO: 38954 - protein, 9 aa, Artificial Sequence
  Peptide Derived from Human Papillomavirus
VVQQLLMGA

SEQ ID NO: 38955 - protein, 11 aa, Artificial Sequence
  Peptide Derived from Human Papillomavirus
YLIHVPCCECK

SEQ ID NO: 38956 - protein, 9 aa, Artificial Sequence
  Peptide Derived from Human Papillomavirus
ACVGLEVGR

SEQ ID NO: 38957 - protein, 10 aa, Artificial Sequence
  Peptide Derived from Human Papillomavirus
ADAYGDSMWF

SEQ ID NO: 38958 - protein, 11 aa, Artificial Sequence
  Peptide Derived from Human Papillomavirus
ADAYGDSMWFY

SEQ ID NO: 38959 - protein, 10 aa, Artificial Sequence
  Peptide Derived from Human Papillomavirus
AGKVGETIPA

SEQ ID NO: 38960 - protein, 9 aa, Artificial Sequence
  Peptide Derived from Human Papillomavirus
AGLSGHPLF

SEQ ID NO: 38961 - protein, 11 aa, Artificial Sequence
  Peptide Derived from Human Papillomavirus
AGLSGHPLFNR

SEQ ID NO: 38962 - protein, 8 aa, Artificial Sequence
  Peptide Derived from Human Papillomavirus
AGSSRLLA

SEQ ID NO: 38963 - protein, 11 aa, Artificial Sequence
  Peptide Derived from Human Papillomavirus
AGSSRLLAVGH

SEQ ID NO: 38964 - protein, 11 aa, Artificial Sequence
  Peptide Derived from Human Papillomavirus
AMDFKVLQESK

SEQ ID NO: 38965 - protein, 8 aa, Artificial Sequence
  Peptide Derived from Human Papillomavirus
AMGEHWTK

SEQ ID NO: 38966 - protein, 10 aa, Artificial Sequence
  Peptide Derived from Human Papillomavirus
AMGEHWTKGA

SEQ ID NO: 38967 - protein, 8 aa, Artificial Sequence
  Peptide Derived from Human Papillomavirus
ATDSYVKR

SEQ ID NO: 38968 - protein, 8 aa, Artificial Sequence
  Peptide Derived from Human Papillomavirus
ATEQLSKY

SEQ ID NO: 38969 - protein, 10 aa, Artificial Sequence
  Peptide Derived from Human Papillomavirus
ATEQLSKYDA

SEQ ID NO: 38970 - protein, 11 aa, Artificial Sequence
  Peptide Derived from Human Papillomavirus
ATEQLSKYDAR

SEQ ID NO: 38971 - protein, 8 aa, Artificial Sequence
  Peptide Derived from Human Papillomavirus
ATSKKRSA

SEQ ID NO: 38972 - protein, 8 aa, Artificial Sequence
  Peptide Derived from Human Papillomavirus
ATSLEDKY

SEQ ID NO: 38973 - protein, 9 aa, Artificial Sequence
  Peptide Derived from Human Papillomavirus
ATSLEDKYR

SEQ ID NO: 38974 - protein, 10 aa, Artificial Sequence
  Peptide Derived from Human Papillomavirus
ATSLEDKYRY

SEQ ID NO: 38975 - protein, 9 aa, Artificial Sequence
  Peptide Derived from Human Papillomavirus
ATWRPSENK

SEQ ID NO: 38976 - protein, 11 aa, Artificial Sequence
  Peptide Derived from Human Papillomavirus
ATWRPSENKVY

SEQ ID NO: 38977 - protein, 8 aa, Artificial Sequence
  Peptide Derived from Human Papillomavirus
AVATSKKR

SEQ ID NO: 38978 - protein, 10 aa, Artificial Sequence
  Peptide Derived from Human Papillomavirus
AVATSKKRSA

SEQ ID NO: 38979 - protein, 11 aa, Artificial Sequence
  Peptide Derived from Human Papillomavirus
AVGHPYYSVTK

SEQ ID NO: 38980 - protein, 8 aa, Artificial Sequence
  Peptide Derived from Human Papillomavirus
AVNVFPIF

SEQ ID NO: 38981 - protein, 8 aa, Artificial Sequence
  Peptide Derived from Human Papillomavirus
CIFLDVGA

SEQ ID NO: 38982 - protein, 8 aa, Artificial Sequence
  Peptide Derived from Human Papillomavirus
CIVGCTPA

SEQ ID NO: 38983 - protein, 8 aa, Artificial Sequence
  Peptide Derived from Human Papillomavirus
CTPAMGEH

SEQ ID NO: 38984 - protein, 11 aa, Artificial Sequence
  Peptide Derived from Human Papillomavirus
CTPAMGEHWTK

SEQ ID NO: 38985 - protein, 8 aa, Artificial Sequence
  Peptide Derived from Human Papillomavirus
CVGLEVGR

SEQ ID NO: 38986 - protein, 8 aa, Artificial Sequence
  Peptide Derived from Human Papillomavirus
DARKINQY

SEQ ID NO: 38987 - protein, 10 aa, Artificial Sequence
  Peptide Derived from Human Papillomavirus
DARKINQYLR

SEQ ID NO: 38988 - protein, 11 aa, Artificial Sequence
  Peptide Derived from Human Papillomavirus
DARKINQYLRH

SEQ ID NO: 38989 - protein, 9 aa, Artificial Sequence
  Peptide Derived from Human Papillomavirus
DAYGDSMWF

SEQ ID NO: 38990 - protein, 10 aa, Artificial Sequence
  Peptide Derived from Human Papillomavirus
DAYGDSMWFY

SEQ ID NO: 38991 - protein, 9 aa, Artificial Sequence
  Peptide Derived from Human Papillomavirus
DDTESSNLA

SEQ ID NO: 38992 - protein, 9 aa, Artificial Sequence
  Peptide Derived from Human Papillomavirus
DFKVLQESK

SEQ ID NO: 38993 - protein, 10 aa, Artificial Sequence
  Peptide Derived from Human Papillomavirus
DFKVLQESKA

SEQ ID NO: 38994 - protein, 9 aa, Artificial Sequence
  Peptide Derived from Human Papillomavirus
DGDMIDTGF

SEQ ID NO: 38995 - protein, 11 aa, Artificial Sequence
  Peptide Derived from Human Papillomavirus
DGDMIDTGFGA

SEQ ID NO: 38996 - protein, 8 aa, Artificial Sequence
  Peptide Derived from Human Papillomavirus
DIVQSTCK

SEQ ID NO: 38997 - protein, 9 aa, Artificial Sequence
  Peptide Derived from Human Papillomavirus
DIVQSTCKY

SEQ ID NO: 38998 - protein, 9 aa, Artificial Sequence
  Peptide Derived from Human Papillomavirus
DLDQFPLGR

SEQ ID NO: 38999 - protein, 10 aa, Artificial Sequence
  Peptide Derived from Human Papillomavirus
DLDQFPLGRK

SEQ ID NO: 39000 - protein, 11 aa, Artificial Sequence
  Peptide Derived from Human Papillomavirus
DLDQFPLGRKF

SEQ ID NO: 39001 - protein, 9 aa, Artificial Sequence
  Peptide Derived from Human Papillomavirus
DMIDTGFGA

SEQ ID NO: 39002 - protein, 10 aa, Artificial Sequence
  Peptide Derived from Human Papillomavirus
DSFSTDLDQF

SEQ ID NO: 39003 - protein, 8 aa, Artificial Sequence
  Peptide Derived from Human Papillomavirus
DSMWFYLR

SEQ ID NO: 39004 - protein, 9 aa, Artificial Sequence
  Peptide Derived from Human Papillomavirus
DSMWFYLRR

SEQ ID NO: 39005 - protein, 11 aa, Artificial Sequence
  Peptide Derived from Human Papillomavirus
DSRDNISVDGK

SEQ ID NO: 39006 - protein, 10 aa, Artificial Sequence
  Peptide Derived from Human Papillomavirus
DSYVKRTSIF

SEQ ID NO: 39007 - protein, 11 aa, Artificial Sequence
  Peptide Derived from Human Papillomavirus
DSYVKRTSIFY

SEQ ID NO: 39008 - protein, 8 aa, Artificial Sequence
  Peptide Derived from Human Papillomavirus
DTESSNLA

SEQ ID NO: 39009 - protein, 9 aa, Artificial Sequence
  Peptide Derived from Human Papillomavirus
DTGFGAMDF

SEQ ID NO: 39010 - protein, 10 aa, Artificial Sequence
  Peptide Derived from Human Papillomavirus
DTGFGAMDFK

SEQ ID NO: 39011 - protein, 11 aa, Artificial Sequence
  Peptide Derived from Human Papillomavirus
DTNIYNPDQER

SEQ ID NO: 39012 - protein, 8 aa, Artificial Sequence
  Peptide Derived from Human Papillomavirus
DVGAVNVF

SEQ ID NO: 39013 - protein, 11 aa, Artificial Sequence
  Peptide Derived from Human Papillomavirus
DVGAVNVFPIF

SEQ ID NO: 39014 - protein, 8 aa, Artificial Sequence
  Peptide Derived from Human Papillomavirus
DVNLQDSF

SEQ ID NO: 39015 - protein, 9 aa, Artificial Sequence
  Peptide Derived from Human Papillomavirus
EAQLFNKPY

SEQ ID NO: 39016 - protein, 10 aa, Artificial Sequence
  Peptide Derived from Human Papillomavirus
EDGDMIDTGF

SEQ ID NO: 39017 - protein, 8 aa, Artificial Sequence
  Peptide Derived from Human Papillomavirus
EDKYRYVR

SEQ ID NO: 39018 - protein, 11 aa, Artificial Sequence
  Peptide Derived from Human Papillomavirus
EDKYRYVRSTA

SEQ ID NO: 39019 - protein, 10 aa, Artificial Sequence
  Peptide Derived from Human Papillomavirus
ELQFVFQLCK

SEQ ID NO: 39020 - protein, 10 aa, Artificial Sequence
  Peptide Derived from Human Papillomavirus
ELYLKGSNGR

SEQ ID NO: 39021 - protein, 8 aa, Artificial Sequence
  Peptide Derived from Human Papillomavirus
ETIPAELY

SEQ ID NO: 39022 - protein, 10 aa, Artificial Sequence
  Peptide Derived from Human Papillomavirus
ETIPAELYLK

SEQ ID NO: 39023 - protein, 10 aa, Artificial Sequence
  Peptide Derived from Human Papillomavirus
EVGRGQPLGA

SEQ ID NO: 39024 - protein, 11 aa, Artificial Sequence
  Peptide Derived from Human Papillomavirus
EVMAYLHNMNA

SEQ ID NO: 39025 - protein, 8 aa, Artificial Sequence
  Peptide Derived from Human Papillomavirus
FARHYFNR

SEQ ID NO: 39026 - protein, 9 aa, Artificial Sequence
  Peptide Derived from Human Papillomavirus
FARHYFNRA

SEQ ID NO: 39027 - protein, 11 aa, Artificial Sequence
  Peptide Derived from Human Papillomavirus
FARHYFNRAGK

SEQ ID NO: 39028 - protein, 9 aa, Artificial Sequence
  Peptide Derived from Human Papillomavirus
FGLPDTNIY

SEQ ID NO: 39029 - protein, 10 aa, Artificial Sequence
  Peptide Derived from Human Papillomavirus
FLDVGAVNVF

SEQ ID NO: 39030 - protein, 8 aa, Artificial Sequence
  Peptide Derived from Human Papillomavirus
FLMQLGTR

SEQ ID NO: 39031 - protein, 10 aa, Artificial Sequence
  Peptide Derived from Human Papillomavirus
FLMQLGTRSK

SEQ ID NO: 39032 - protein, 8 aa, Artificial Sequence
  Peptide Derived from Human Papillomavirus
FLQMATWR

SEQ ID NO: 39033 - protein, 8 aa, Artificial Sequence
  Peptide Derived from Human Papillomavirus
FSTDLDQF

SEQ ID NO: 39034 - protein, 9 aa, Artificial Sequence
  Peptide Derived from Human Papillomavirus
FVTVVDTTR

SEQ ID NO: 39035 - protein, 10 aa, Artificial Sequence
  Peptide Derived from Human Papillomavirus
GAGLSGHPLF

SEQ ID NO: 39036 - protein, 9 aa, Artificial Sequence
  Peptide Derived from Human Papillomavirus
GAVNVFPIF

SEQ ID NO: 39037 - protein, 9 aa, Artificial Sequence
  Peptide Derived from Human Papillomavirus
GCTPAMGEH

SEQ ID NO: 39038 - protein, 8 aa, Artificial Sequence
  Peptide Derived from Human Papillomavirus
GDMIDTGF

SEQ ID NO: 39039 - protein, 10 aa, Artificial Sequence
  Peptide Derived from Human Papillomavirus
GDMIDTGFGA

SEQ ID NO: 39040 - protein, 9 aa, Artificial Sequence
  Peptide Derived from Human Papillomavirus
GDSMWFYLR

SEQ ID NO: 39041 - protein, 10 aa, Artificial Sequence
  Peptide Derived from Human Papillomavirus
GDSMWFYLRR

SEQ ID NO: 39042 - protein, 8 aa, Artificial Sequence
  Peptide Derived from Human Papillomavirus
GFGAMDFK

SEQ ID NO: 39043 - protein, 9 aa, Artificial Sequence
  Peptide Derived from Human Papillomavirus
GICWGNQLF

SEQ ID NO: 39044 - protein, 10 aa, Artificial Sequence
  Peptide Derived from Human Papillomavirus
GLCIFLDVGA

SEQ ID NO: 39045 - protein, 8 aa, Artificial Sequence
  Peptide Derived from Human Papillomavirus
GLPDTNIY

SEQ ID NO: 39046 - protein, 8 aa, Artificial Sequence
  Peptide Derived from Human Papillomavirus
GLSGHPLF

SEQ ID NO: 39047 - protein, 10 aa, Artificial Sequence
  Peptide Derived from Human Papillomavirus
GLSGHPLFNR

SEQ ID NO: 39048 - protein, 8 aa, Artificial Sequence
  Peptide Derived from Human Papillomavirus
GSMITSEA

SEQ ID NO: 39049 - protein, 11 aa, Artificial Sequence
  Peptide Derived from Human Papillomavirus
GSMITSEAQLF

SEQ ID NO: 39050 - protein, 10 aa, Artificial Sequence
  Peptide Derived from Human Papillomavirus
GSSRLLAVGH

SEQ ID NO: 39051 - protein, 9 aa, Artificial Sequence
  Peptide Derived from Human Papillomavirus
GTRSKPAVA

SEQ ID NO: 39052 - protein, 9 aa, Artificial Sequence
  Peptide Derived from Human Papillomavirus
HAGSSRLLA

SEQ ID NO: 39053 - protein, 9 aa, Artificial Sequence
  Peptide Derived from Human Papillomavirus
HVEEYELQF

SEQ ID NO: 39054 - protein, 11 aa, Artificial Sequence
  Peptide Derived from Human Papillomavirus
HVEEYELQFVF

SEQ ID NO: 39055 - protein, 8 aa, Artificial Sequence
  Peptide Derived from Human Papillomavirus
ICWGNQLF

SEQ ID NO: 39056 - protein, 10 aa, Artificial Sequence
  Peptide Derived from Human Papillomavirus
IDTGFGAMDF

SEQ ID NO: 39057 - protein, 11 aa, Artificial Sequence
  Peptide Derived from Human Papillomavirus
IDTGFGAMDFK

SEQ ID NO: 39058 - protein, 11 aa, Artificial Sequence
  Peptide Derived from Human Papillomavirus
IFLDVGAVNVF

SEQ ID NO: 39059 - protein, 9 aa, Artificial Sequence
  Peptide Derived from Human Papillomavirus
IFLQMATWR

SEQ ID NO: 39060 - protein, 9 aa, Artificial Sequence
  Peptide Derived from Human Papillomavirus
IFYHAGSSR

SEQ ID NO: 39061 - protein, 8 aa, Artificial Sequence
  Peptide Derived from Human Papillomavirus
IGLSPPVA

SEQ ID NO: 39062 - protein, 10 aa, Artificial Sequence
  Peptide Derived from Human Papillomavirus
ISTATEQLSK

SEQ ID NO: 39063 - protein, 11 aa, Artificial Sequence
  Peptide Derived from Human Papillomavirus
ISTATEQLSKY

SEQ ID NO: 39064 - protein, 9 aa, Artificial Sequence
  Peptide Derived from Human Papillomavirus
ITLSAEVMA

SEQ ID NO: 39065 - protein, 10 aa, Artificial Sequence
  Peptide Derived from Human Papillomavirus
ITLSAEVMAY

SEQ ID NO: 39066 - protein, 8 aa, Artificial Sequence
  Peptide Derived from Human Papillomavirus
ITSEAQLF

SEQ ID NO: 39067 - protein, 10 aa, Artificial Sequence
  Peptide Derived from Human Papillomavirus
ITSEAQLFNK

SEQ ID NO: 39068 - protein, 11 aa, Artificial Sequence
  Peptide Derived from Human Papillomavirus
IVGCTPAMGEH

SEQ ID NO: 39069 - protein, 8 aa, Artificial Sequence
  Peptide Derived from Human Papillomavirus
IVQSTCKY

SEQ ID NO: 39070 - protein, 11 aa, Artificial Sequence
  Peptide Derived from Human Papillomavirus
IVQSTCKYPDY

SEQ ID NO: 39071 - protein, 10 aa, Artificial Sequence
  Peptide Derived from Human Papillomavirus
KDNTKTNIPK

SEQ ID NO: 39072 - protein, 10 aa, Artificial Sequence
  Peptide Derived from Human Papillomavirus
KFGLPDTNIY

SEQ ID NO: 39073 - protein, 9 aa, Artificial Sequence
  Peptide Derived from Human Papillomavirus
KFLMQLGTR

SEQ ID NO: 39074 - protein, 11 aa, Artificial Sequence
  Peptide Derived from Human Papillomavirus
KFLMQLGTRSK

SEQ ID NO: 39075 - protein, 11 aa, Artificial Sequence
  Peptide Derived from Human Papillomavirus
KFWDVNLQDSF

SEQ ID NO: 39076 - protein, 8 aa, Artificial Sequence
  Peptide Derived from Human Papillomavirus
KINQYLRH

SEQ ID NO: 39077 - protein, 10 aa, Artificial Sequence
  Peptide Derived from Human Papillomavirus
KITLSAEVMA

SEQ ID NO: 39078 - protein, 11 aa, Artificial Sequence
  Peptide Derived from Human Papillomavirus
KITLSAEVMAY

SEQ ID NO: 39079 - protein, 9 aa, Artificial Sequence
  Peptide Derived from Human Papillomavirus
KTNIPKVSA

SEQ ID NO: 39080 - protein, 10 aa, Artificial Sequence
  Peptide Derived from Human Papillomavirus
KTNIPKVSAY

SEQ ID NO: 39081 - protein, 8 aa, Artificial Sequence
  Peptide Derived from Human Papillomavirus
KVGETIPA

SEQ ID NO: 39082 - protein, 11 aa, Artificial Sequence
  Peptide Derived from Human Papillomavirus
KVGETIPAELY

SEQ ID NO: 39083 - protein, 8 aa, Artificial Sequence
  Peptide Derived from Human Papillomavirus
KVLQESKA

SEQ ID NO: 39084 - protein, 8 aa, Artificial Sequence
  Peptide Derived from Human Papillomavirus
KVSAYQYR

SEQ ID NO: 39085 - protein, 10 aa, Artificial Sequence
  Peptide Derived from Human Papillomavirus
KVSAYQYRVF

SEQ ID NO: 39086 - protein, 11 aa, Artificial Sequence
  Peptide Derived from Human Papillomavirus
KVSAYQYRVFR

SEQ ID NO: 39087 - protein, 8 aa, Artificial Sequence
  Peptide Derived from Human Papillomavirus
KVVATDSY

SEQ ID NO: 39088 - protein, 10 aa, Artificial Sequence
  Peptide Derived from Human Papillomavirus
KVVATDSYVK

SEQ ID NO: 39089 - protein, 11 aa, Artificial Sequence
  Peptide Derived from Human Papillomavirus
KVVATDSYVKR

SEQ ID NO: 39090 - protein, 11 aa, Artificial Sequence
  Peptide Derived from Human Papillomavirus
KVYLPPTPVSK

SEQ ID NO: 39091 - protein, 11 aa, Artificial Sequence
  Peptide Derived from Human Papillomavirus
LANNNVIEDSR

SEQ ID NO: 39092 - protein, 8 aa, Artificial Sequence
  Peptide Derived from Human Papillomavirus
LAVGHPYY

SEQ ID NO: 39093 - protein, 9 aa, Artificial Sequence
  Peptide Derived from Human Papillomavirus
LCIFLDVGA

SEQ ID NO: 39094 - protein, 9 aa, Artificial Sequence
  Peptide Derived from Human Papillomavirus
LCIVGCTPA

SEQ ID NO: 39095 - protein, 8 aa, Artificial Sequence
  Peptide Derived from Human Papillomavirus
LCKITLSA

SEQ ID NO: 39096 - protein, 10 aa, Artificial Sequence
  Peptide Derived from Human Papillomavirus
LDDTESSNLA

SEQ ID NO: 39097 - protein, 9 aa, Artificial Sequence
  Peptide Derived from Human Papillomavirus
LDIVQSTCK

SEQ ID NO: 39098 - protein, 10 aa, Artificial Sequence
  Peptide Derived from Human Papillomavirus
LDIVQSTCKY

SEQ ID NO: 39099 - protein, 8 aa, Artificial Sequence
  Peptide Derived from Human Papillomavirus
LDQFPLGR

SEQ ID NO: 39100 - protein, 9 aa, Artificial Sequence
  Peptide Derived from Human Papillomavirus
LDQFPLGRK

SEQ ID NO: 39101 - protein, 10 aa, Artificial Sequence
  Peptide Derived from Human Papillomavirus
LDQFPLGRKF

SEQ ID NO: 39102 - protein, 9 aa, Artificial Sequence
  Peptide Derived from Human Papillomavirus
LDVGAVNVF

SEQ ID NO: 39103 - protein, 9 aa, Artificial Sequence
  Peptide Derived from Human Papillomavirus
LFARHYFNR

SEQ ID NO: 39104 - protein, 10 aa, Artificial Sequence
  Peptide Derived from Human Papillomavirus
LFARHYFNRA

SEQ ID NO: 39105 - protein, 10 aa, Artificial Sequence
  Peptide Derived from Human Papillomavirus
LFNKPYWLQR

SEQ ID NO: 39106 - protein, 11 aa, Artificial Sequence
  Peptide Derived from Human Papillomavirus
LFNKPYWLQRA

SEQ ID NO: 39107 - protein, 10 aa, Artificial Sequence
  Peptide Derived from Human Papillomavirus
LFVTVVDTTR

SEQ ID NO: 39108 - protein, 8 aa, Artificial Sequence
  Peptide Derived from Human Papillomavirus
LGAGLSGH

SEQ ID NO: 39109 - protein, 11 aa, Artificial Sequence
  Peptide Derived from Human Papillomavirus
LGAGLSGHPLF

SEQ ID NO: 39110 - protein, 8 aa, Artificial Sequence
  Peptide Derived from Human Papillomavirus
LGTRSKPA

SEQ ID NO: 39111 - protein, 10 aa, Artificial Sequence
  Peptide Derived from Human Papillomavirus
LGTRSKPAVA

SEQ ID NO: 39112 - protein, 8 aa, Artificial Sequence
  Peptide Derived from Human Papillomavirus
LLAVGHPY

SEQ ID NO: 39113 - protein, 9 aa, Artificial Sequence
  Peptide Derived from Human Papillomavirus
LLAVGHPYY

SEQ ID NO: 39114 - protein, 9 aa, Artificial Sequence
  Peptide Derived from Human Papillomavirus
LMQLGTRSK

SEQ ID NO: 39115 - protein, 11 aa, Artificial Sequence
  Peptide Derived from Human Papillomavirus
LMQLGTRSKPA

SEQ ID NO: 39116 - protein, 8 aa, Artificial Sequence
  Peptide Derived from Human Papillomavirus
LSAEVMAY

SEQ ID NO: 39117 - protein, 10 aa, Artificial Sequence
  Peptide Derived from Human Papillomavirus
LSAEVMAYLH

SEQ ID NO: 39118 - protein, 9 aa, Artificial Sequence
  Peptide Derived from Human Papillomavirus
LSGHPLFNR

SEQ ID NO: 39119 - protein, 8 aa, Artificial Sequence
  Peptide Derived from Human Papillomavirus
LSKYDARK

SEQ ID NO: 39120 - protein, 10 aa, Artificial Sequence
  Peptide Derived from Human Papillomavirus
MATWRPSENK

SEQ ID NO: 39121 - protein, 9 aa, Artificial Sequence
  Peptide Derived from Human Papillomavirus
MAYLHNMNA

SEQ ID NO: 39122 - protein, 10 aa, Artificial Sequence
  Peptide Derived from Human Papillomavirus
MDFKVLQESK

SEQ ID NO: 39123 - protein, 11 aa, Artificial Sequence
  Peptide Derived from Human Papillomavirus
MDFKVLQESKA

SEQ ID NO: 39124 - protein, 9 aa, Artificial Sequence
  Peptide Derived from Human Papillomavirus
MGEHWTKGA

SEQ ID NO: 39125 - protein, 8 aa, Artificial Sequence
  Peptide Derived from Human Papillomavirus
MIDTGFGA

SEQ ID NO: 39126 - protein, 11 aa, Artificial Sequence
  Peptide Derived from Human Papillomavirus
MIDTGFGAMDF

SEQ ID NO: 39127 - protein, 9 aa, Artificial Sequence
  Peptide Derived from Human Papillomavirus
MITSEAQLF

SEQ ID NO: 39128 - protein, 11 aa, Artificial Sequence
  Peptide Derived from Human Papillomavirus
MITSEAQLFNK

SEQ ID NO: 39129 - protein, 8 aa, Artificial Sequence
  Peptide Derived from Human Papillomavirus
MLPMMYIY

SEQ ID NO: 39130 - protein, 9 aa, Artificial Sequence
  Peptide Derived from Human Papillomavirus
MLPMMYIYR

SEQ ID NO: 39131 - protein, 9 aa, Artificial Sequence
  Peptide Derived from Human Papillomavirus
MMLPMMYIY

SEQ ID NO: 39132 - protein, 10 aa, Artificial Sequence
  Peptide Derived from Human Papillomavirus
MMLPMMYIYR

SEQ ID NO: 39133 - protein, 11 aa, Artificial Sequence
  Peptide Derived from Human Papillomavirus
MMYIYRDPPLH

SEQ ID NO: 39134 - protein, 10 aa, Artificial Sequence
  Peptide Derived from Human Papillomavirus
NGICWGNQLF

SEQ ID NO: 39135 - protein, 11 aa, Artificial Sequence
  Peptide Derived from Human Papillomavirus
NGREPPPSSVY

SEQ ID NO: 39136 - protein, 9 aa, Artificial Sequence
  Peptide Derived from Human Papillomavirus
NIGLSPPVA

SEQ ID NO: 39137 - protein, 8 aa, Artificial Sequence
  Peptide Derived from Human Papillomavirus
NIPKVSAY

SEQ ID NO: 39138 - protein, 10 aa, Artificial Sequence
  Peptide Derived from Human Papillomavirus
NIPKVSAYQY

SEQ ID NO: 39139 - protein, 11 aa, Artificial Sequence
  Peptide Derived from Human Papillomavirus
NIPKVSAYQYR

SEQ ID NO: 39140 - protein, 9 aa, Artificial Sequence
  Peptide Derived from Human Papillomavirus
NIYNPDQER

SEQ ID NO: 39141 - protein, 8 aa, Artificial Sequence
  Peptide Derived from Human Papillomavirus
NTKTNIPK

SEQ ID NO: 39142 - protein, 11 aa, Artificial Sequence
  Peptide Derived from Human Papillomavirus
NTKTNIPKVSA

SEQ ID NO: 39143 - protein, 10 aa, Artificial Sequence
  Peptide Derived from Human Papillomavirus
NVFPIFLQMA

SEQ ID NO: 39144 - protein, 9 aa, Artificial Sequence
  Peptide Derived from Human Papillomavirus
PAMGEHWTK

SEQ ID NO: 39145 - protein, 11 aa, Artificial Sequence
  Peptide Derived from Human Papillomavirus
PAMGEHWTKGA

SEQ ID NO: 39146 - protein, 8 aa, Artificial Sequence
  Peptide Derived from Human Papillomavirus
PAVATSKK

SEQ ID NO: 39147 - protein, 9 aa, Artificial Sequence
  Peptide Derived from Human Papillomavirus
PAVATSKKR

SEQ ID NO: 39148 - protein, 11 aa, Artificial Sequence
  Peptide Derived from Human Papillomavirus
PAVATSKKRSA

SEQ ID NO: 39149 - protein, 9 aa, Artificial Sequence
  Peptide Derived from Human Papillomavirus
PDQERLVWA

SEQ ID NO: 39150 - protein, 8 aa, Artificial Sequence
  Peptide Derived from Human Papillomavirus
PDYLKMSA

SEQ ID NO: 39151 - protein, 10 aa, Artificial Sequence
  Peptide Derived from Human Papillomavirus
PDYLKMSADA

SEQ ID NO: 39152 - protein, 11 aa, Artificial Sequence
  Peptide Derived from Human Papillomavirus
PDYLKMSADAY

SEQ ID NO: 39153 - protein, 10 aa, Artificial Sequence
  Peptide Derived from Human Papillomavirus
PIFLQMATWR

SEQ ID NO: 39154 - protein, 10 aa, Artificial Sequence
  Peptide Derived from Human Papillomavirus
PLDIVQSTCK

SEQ ID NO: 39155 - protein, 11 aa, Artificial Sequence
  Peptide Derived from Human Papillomavirus
PLDIVQSTCKY

SEQ ID NO: 39156 - protein, 9 aa, Artificial Sequence
  Peptide Derived from Human Papillomavirus
PLGAGLSGH

SEQ ID NO: 39157 - protein, 9 aa, Artificial Sequence
  Peptide Derived from Human Papillomavirus
PLHYGLCIF

SEQ ID NO: 39158 - protein, 10 aa, Artificial Sequence
  Peptide Derived from Human Papillomavirus
PSGSMITSEA

SEQ ID NO: 39159 - protein, 9 aa, Artificial Sequence
  Peptide Derived from Human Papillomavirus
PTEKQDPLA

SEQ ID NO: 39160 - protein, 10 aa, Artificial Sequence
  Peptide Derived from Human Papillomavirus
PTEKQDPLAK

SEQ ID NO: 39161 - protein, 11 aa, Artificial Sequence
  Peptide Derived from Human Papillomavirus
PTEKQDPLAKY

SEQ ID NO: 39162 - protein, 9 aa, Artificial Sequence
  Peptide Derived from Human Papillomavirus
PTPVSKVVA

SEQ ID NO: 39163 - protein, 8 aa, Artificial Sequence
  Peptide Derived from Human Papillomavirus
PTSTSTPA

SEQ ID NO: 39164 - protein, 9 aa, Artificial Sequence
  Peptide Derived from Human Papillomavirus
PTSTSTPAK

SEQ ID NO: 39165 - protein, 10 aa, Artificial Sequence
  Peptide Derived from Human Papillomavirus
PTSTSTPAKR

SEQ ID NO: 39166 - protein, 11 aa, Artificial Sequence
  Peptide Derived from Human Papillomavirus
PTSTSTPAKRK

SEQ ID NO: 39167 - protein, 9 aa, Artificial Sequence
  Peptide Derived from Human Papillomavirus
PVATSLEDK

SEQ ID NO: 39168 - protein, 10 aa, Artificial Sequence
  Peptide Derived from Human Papillomavirus
PVATSLEDKY

SEQ ID NO: 39169 - protein, 11 aa, Artificial Sequence
  Peptide Derived from Human Papillomavirus
PVATSLEDKYR

SEQ ID NO: 39170 - protein, 11 aa, Artificial Sequence
  Peptide Derived from Human Papillomavirus
PVSKVVATDSY

SEQ ID NO: 39171 - protein, 8 aa, Artificial Sequence
  Peptide Derived from Human Papillomavirus
QDPLAKYK

SEQ ID NO: 39172 - protein, 9 aa, Artificial Sequence
  Peptide Derived from Human Papillomavirus
QDPLAKYKF

SEQ ID NO: 39173 - protein, 11 aa, Artificial Sequence
  Peptide Derived from Human Papillomavirus
QDSFSTDLDQF

SEQ ID NO: 39174 - protein, 8 aa, Artificial Sequence
  Peptide Derived from Human Papillomavirus
QFPLGRKF

SEQ ID NO: 39175 - protein, 8 aa, Artificial Sequence
  Peptide Derived from Human Papillomavirus
QFVFQLCK

SEQ ID NO: 39176 - protein, 10 aa, Artificial Sequence
  Peptide Derived from Human Papillomavirus
QLCIVGCTPA

SEQ ID NO: 39177 - protein, 9 aa, Artificial Sequence
  Peptide Derived from Human Papillomavirus
QLCKITLSA

SEQ ID NO: 39178 - protein, 8 aa, Artificial Sequence
  Peptide Derived from Human Papillomavirus
QLFARHYF

SEQ ID NO: 39179 - protein, 10 aa, Artificial Sequence
  Peptide Derived from Human Papillomavirus
QLFARHYFNR

SEQ ID NO: 39180 - protein, 11 aa, Artificial Sequence
  Peptide Derived from Human Papillomavirus
QLFARHYFNRA

SEQ ID NO: 39181 - protein, 11 aa, Artificial Sequence
  Peptide Derived from Human Papillomavirus
QLFNKPYWLQR

SEQ ID NO: 39182 - protein, 11 aa, Artificial Sequence
  Peptide Derived from Human Papillomavirus
QLFVTVVDTTR

SEQ ID NO: 39183 - protein, 9 aa, Artificial Sequence
  Peptide Derived from Human Papillomavirus
QLGTRSKPA

SEQ ID NO: 39184 - protein, 11 aa, Artificial Sequence
  Peptide Derived from Human Papillomavirus
QLGTRSKPAVA

SEQ ID NO: 39185 - protein, 8 aa, Artificial Sequence
  Peptide Derived from Human Papillomavirus
QLSKYDAR

SEQ ID NO: 39186 - protein, 9 aa, Artificial Sequence
  Peptide Derived from Human Papillomavirus
QLSKYDARK

SEQ ID NO: 39187 - protein, 11 aa, Artificial Sequence
  Peptide Derived from Human Papillomavirus
QMATWRPSENK

SEQ ID NO: 39188 - protein, 9 aa, Artificial Sequence
  Peptide Derived from Human Papillomavirus
QSTCKYPDY

SEQ ID NO: 39189 - protein, 11 aa, Artificial Sequence
  Peptide Derived from Human Papillomavirus
QSTCKYPDYLK

SEQ ID NO: 39190 - protein, 11 aa, Artificial Sequence
  Peptide Derived from Human Papillomavirus
QVTTGDCPPLA

SEQ ID NO: 39191 - protein, 11 aa, Artificial Sequence
  Peptide Derived from Human Papillomavirus
RAGKVGETIPA

SEQ ID NO: 39192 - protein, 9 aa, Artificial Sequence
  Peptide Derived from Human Papillomavirus
RDNISVDGK

SEQ ID NO: 39193 - protein, 11 aa, Artificial Sequence
  Peptide Derived from Human Papillomavirus
RLDDTESSNLA

SEQ ID NO: 39194 - protein, 9 aa, Artificial Sequence
  Peptide Derived from Human Papillomavirus
RLLAVGHPY

SEQ ID NO: 39195 - protein, 10 aa, Artificial Sequence
  Peptide Derived from Human Papillomavirus
RLLAVGHPYY

SEQ ID NO: 39196 - protein, 8 aa, Artificial Sequence
  Peptide Derived from Human Papillomavirus
RLPDPNKF

SEQ ID NO: 39197 - protein, 11 aa, Artificial Sequence
  Peptide Derived from Human Papillomavirus
RSAPTSTSTPA

SEQ ID NO: 39198 - protein, 10 aa, Artificial Sequence
  Peptide Derived from Human Papillomavirus
RSKPAVATSK

SEQ ID NO: 39199 - protein, 11 aa, Artificial Sequence
  Peptide Derived from Human Papillomavirus
RSKPAVATSKK

SEQ ID NO: 39200 - protein, 9 aa, Artificial Sequence
  Peptide Derived from Human Papillomavirus
RSTAITCQR

SEQ ID NO: 39201 - protein, 10 aa, Artificial Sequence
  Peptide Derived from Human Papillomavirus
RSTNMTISTA

SEQ ID NO: 39202 - protein, 8 aa, Artificial Sequence
  Peptide Derived from Human Papillomavirus
RTSIFYHA

SEQ ID NO: 39203 - protein, 9 aa, Artificial Sequence
  Peptide Derived from Human Papillomavirus
RVRLPDPNK

SEQ ID NO: 39204 - protein, 10 aa, Artificial Sequence
  Peptide Derived from Human Papillomavirus
RVRLPDPNKF

SEQ ID NO: 39205 - protein, 11 aa, Artificial Sequence
  Peptide Derived from Human Papillomavirus
SADAYGDSMWF

SEQ ID NO: 39206 - protein, 9 aa, Artificial Sequence
  Peptide Derived from Human Papillomavirus
SAEVMAYLH

SEQ ID NO: 39207 - protein, 10 aa, Artificial Sequence
  Peptide Derived from Human Papillomavirus
SAPTSTSTPA

SEQ ID NO: 39208 - protein, 11 aa, Artificial Sequence
  Peptide Derived from Human Papillomavirus
SAPTSTSTPAK

SEQ ID NO: 39209 - protein, 8 aa, Artificial Sequence
  Peptide Derived from Human Papillomavirus
SAYQYRVF

SEQ ID NO: 39210 - protein, 9 aa, Artificial Sequence
  Peptide Derived from Human Papillomavirus
SAYQYRVFR

SEQ ID NO: 39211 - protein, 11 aa, Artificial Sequence
  Peptide Derived from Human Papillomavirus
SAYQYRVFRVR

SEQ ID NO: 39212 - protein, 9 aa, Artificial Sequence
  Peptide Derived from Human Papillomavirus
SFSTDLDQF

SEQ ID NO: 39213 - protein, 8 aa, Artificial Sequence
  Peptide Derived from Human Papillomavirus
SGHPLFNR

SEQ ID NO: 39214 - protein, 9 aa, Artificial Sequence
  Peptide Derived from Human Papillomavirus
SGSMITSEA

SEQ ID NO: 39215 - protein, 10 aa, Artificial Sequence
  Peptide Derived from Human Papillomavirus
SIFYHAGSSR

SEQ ID NO: 39216 - protein, 8 aa, Artificial Sequence
  Peptide Derived from Human Papillomavirus
SLEDKYRY

SEQ ID NO: 39217 - protein, 10 aa, Artificial Sequence
  Peptide Derived from Human Papillomavirus
SLEDKYRYVR

SEQ ID NO: 39218 - protein, 10 aa, Artificial Sequence
  Peptide Derived from Human Papillomavirus
SMITSEAQLF

SEQ ID NO: 39219 - protein, 8 aa, Artificial Sequence
  Peptide Derived from Human Papillomavirus
SMWFYLRR

SEQ ID NO: 39220 - protein, 9 aa, Artificial Sequence
  Peptide Derived from Human Papillomavirus
SSRLLAVGH

SEQ ID NO: 39221 - protein, 11 aa, Artificial Sequence
  Peptide Derived from Human Papillomavirus
SSRLLAVGHPY

SEQ ID NO: 39222 - protein, 8 aa, Artificial Sequence
  Peptide Derived from Human Papillomavirus
STAITCQR

SEQ ID NO: 39223 - protein, 9 aa, Artificial Sequence
  Peptide Derived from Human Papillomavirus
STATEQLSK

SEQ ID NO: 39224 - protein, 10 aa, Artificial Sequence
  Peptide Derived from Human Papillomavirus
STATEQLSKY

SEQ ID NO: 39225 - protein, 8 aa, Artificial Sequence
  Peptide Derived from Human Papillomavirus
STCKYPDY

SEQ ID NO: 39226 - protein, 10 aa, Artificial Sequence
  Peptide Derived from Human Papillomavirus
STCKYPDYLK

SEQ ID NO: 39227 - protein, 11 aa, Artificial Sequence
  Peptide Derived from Human Papillomavirus
STDLDQFPLGR

SEQ ID NO: 39228 - protein, 9 aa, Artificial Sequence
  Peptide Derived from Human Papillomavirus
STNMTISTA

SEQ ID NO: 39229 - protein, 8 aa, Artificial Sequence
  Peptide Derived from Human Papillomavirus
STPAKRKR

SEQ ID NO: 39230 - protein, 9 aa, Artificial Sequence
  Peptide Derived from Human Papillomavirus
STPAKRKRR

SEQ ID NO: 39231 - protein, 8 aa, Artificial Sequence
  Peptide Derived from Human Papillomavirus
STSTPAKR

SEQ ID NO: 39232 - protein, 9 aa, Artificial Sequence
  Peptide Derived from Human Papillomavirus
STSTPAKRK

SEQ ID NO: 39233 - protein, 10 aa, Artificial Sequence
  Peptide Derived from Human Papillomavirus
STSTPAKRKR

SEQ ID NO: 39234 - protein, 11 aa, Artificial Sequence
  Peptide Derived from Human Papillomavirus
STSTPAKRKRR

SEQ ID NO: 39235 - protein, 8 aa, Artificial Sequence
  Peptide Derived from Human Papillomavirus
SVTKDNTK

SEQ ID NO: 39236 - protein, 8 aa, Artificial Sequence
  Peptide Derived from Human Papillomavirus
TATEQLSK

SEQ ID NO: 39237 - protein, 9 aa, Artificial Sequence
  Peptide Derived from Human Papillomavirus
TATEQLSKY

SEQ ID NO: 39238 - protein, 11 aa, Artificial Sequence
  Peptide Derived from Human Papillomavirus
TATEQLSKYDA

SEQ ID NO: 39239 - protein, 9 aa, Artificial Sequence
  Peptide Derived from Human Papillomavirus
TCKYPDYLK

SEQ ID NO: 39240 - protein, 11 aa, Artificial Sequence
  Peptide Derived from Human Papillomavirus
TCQREQPPTEK

SEQ ID NO: 39241 - protein, 10 aa, Artificial Sequence
  Peptide Derived from Human Papillomavirus
TDLDQFPLGR

SEQ ID NO: 39242 - protein, 11 aa, Artificial Sequence
  Peptide Derived from Human Papillomavirus
TDLDQFPLGRK

SEQ ID NO: 39243 - protein, 11 aa, Artificial Sequence
  Peptide Derived from Human Papillomavirus
TDSYVKRTSIF

SEQ ID NO: 39244 - protein, 8 aa, Artificial Sequence
  Peptide Derived from Human Papillomavirus
TGDCPPLA

SEQ ID NO: 39245 - protein, 8 aa, Artificial Sequence
  Peptide Derived from Human Papillomavirus
TGFGAMDF

SEQ ID NO: 39246 - protein, 9 aa, Artificial Sequence
  Peptide Derived from Human Papillomavirus
TGFGAMDFK

SEQ ID NO: 39247 - protein, 9 aa, Artificial Sequence
  Peptide Derived from Human Papillomavirus
TIPAELYLK

SEQ ID NO: 39248 - protein, 11 aa, Artificial Sequence
  Peptide Derived from Human Papillomavirus
TISTATEQLSK

SEQ ID NO: 39249 - protein, 8 aa, Artificial Sequence
  Peptide Derived from Human Papillomavirus
TLSAEVMA

SEQ ID NO: 39250 - protein, 9 aa, Artificial Sequence
  Peptide Derived from Human Papillomavirus
TLSAEVMAY

SEQ ID NO: 39251 - protein, 11 aa, Artificial Sequence
  Peptide Derived from Human Papillomavirus
TLSAEVMAYLH

SEQ ID NO: 39252 - protein, 9 aa, Artificial Sequence
  Peptide Derived from Human Papillomavirus
TSEAQLFNK

SEQ ID NO: 39253 - protein, 11 aa, Artificial Sequence
  Peptide Derived from Human Papillomavirus
TSEAQLFNKPY

SEQ ID NO: 39254 - protein, 11 aa, Artificial Sequence
  Peptide Derived from Human Papillomavirus
TSIFYHAGSSR

SEQ ID NO: 39255 - protein, 8 aa, Artificial Sequence
  Peptide Derived from Human Papillomavirus
TSLEDKYR

SEQ ID NO: 39256 - protein, 9 aa, Artificial Sequence
  Peptide Derived from Human Papillomavirus
TSLEDKYRY

SEQ ID NO: 39257 - protein, 11 aa, Artificial Sequence
  Peptide Derived from Human Papillomavirus
TSLEDKYRYVR

SEQ ID NO: 39258 - protein, 8 aa, Artificial Sequence
  Peptide Derived from Human Papillomavirus
TSTPAKRK

SEQ ID NO: 39259 - protein, 9 aa, Artificial Sequence
  Peptide Derived from Human Papillomavirus
TSTPAKRKR

SEQ ID NO: 39260 - protein, 10 aa, Artificial Sequence
  Peptide Derived from Human Papillomavirus
TSTPAKRKRR

SEQ ID NO: 39261 - protein, 8 aa, Artificial Sequence
  Peptide Derived from Human Papillomavirus
TSTSTPAK

SEQ ID NO: 39262 - protein, 9 aa, Artificial Sequence
  Peptide Derived from Human Papillomavirus
TSTSTPAKR

SEQ ID NO: 39263 - protein, 10 aa, Artificial Sequence
  Peptide Derived from Human Papillomavirus
TSTSTPAKRK

SEQ ID NO: 39264 - protein, 11 aa, Artificial Sequence
  Peptide Derived from Human Papillomavirus
TSTSTPAKRKR

SEQ ID NO: 39265 - protein, 9 aa, Artificial Sequence
  Peptide Derived from Human Papillomavirus
TTGDCPPLA

SEQ ID NO: 39266 - protein, 8 aa, Artificial Sequence
  Peptide Derived from Human Papillomavirus
VATDSYVK

SEQ ID NO: 39267 - protein, 9 aa, Artificial Sequence
  Peptide Derived from Human Papillomavirus
VATDSYVKR

SEQ ID NO: 39268 - protein, 9 aa, Artificial Sequence
  Peptide Derived from Human Papillomavirus
VATSKKRSA

SEQ ID NO: 39269 - protein, 8 aa, Artificial Sequence
  Peptide Derived from Human Papillomavirus
VATSLEDK

SEQ ID NO: 39270 - protein, 9 aa, Artificial Sequence
  Peptide Derived from Human Papillomavirus
VATSLEDKY

SEQ ID NO: 39271 - protein, 10 aa, Artificial Sequence
  Peptide Derived from Human Papillomavirus
VATSLEDKYR

SEQ ID NO: 39272 - protein, 11 aa, Artificial Sequence
  Peptide Derived from Human Papillomavirus
VATSLEDKYRY

SEQ ID NO: 39273 - protein, 9 aa, Artificial Sequence
  Peptide Derived from Human Papillomavirus
VFPIFLQMA

SEQ ID NO: 39274 - protein, 11 aa, Artificial Sequence
  Peptide Derived from Human Papillomavirus
VFQLCKITLSA

SEQ ID NO: 39275 - protein, 11 aa, Artificial Sequence
  Peptide Derived from Human Papillomavirus
VFRVRLPDPNK

SEQ ID NO: 39276 - protein, 10 aa, Artificial Sequence
  Peptide Derived from Human Papillomavirus
VGAVNVFPIF

SEQ ID NO: 39277 - protein, 10 aa, Artificial Sequence
  Peptide Derived from Human Papillomavirus
VGCTPAMGEH

SEQ ID NO: 39278 - protein, 10 aa, Artificial Sequence
  Peptide Derived from Human Papillomavirus
VGETIPAELY

SEQ ID NO: 39279 - protein, 10 aa, Artificial Sequence
  Peptide Derived from Human Papillomavirus
VGHPYYSVTK

SEQ ID NO: 39280 - protein, 9 aa, Artificial Sequence
  Peptide Derived from Human Papillomavirus
VGRGQPLGA

SEQ ID NO: 39281 - protein, 10 aa, Artificial Sequence
  Peptide Derived from Human Papillomavirus
VMAYLHNMNA

SEQ ID NO: 39282 - protein, 9 aa, Artificial Sequence
  Peptide Derived from Human Papillomavirus
VSAYQYRVF

SEQ ID NO: 39283 - protein, 10 aa, Artificial Sequence
  Peptide Derived from Human Papillomavirus
VSAYQYRVFR

SEQ ID NO: 39284 - protein, 10 aa, Artificial Sequence
  Peptide Derived from Human Papillomavirus
VSKVVATDSY

SEQ ID NO: 39285 - protein, 10 aa, Artificial Sequence
  Peptide Derived from Human Papillomavirus
VTTGDCPPLA

SEQ ID NO: 39286 - protein, 8 aa, Artificial Sequence
  Peptide Derived from Human Papillomavirus
VTVVDTTR

SEQ ID NO: 39287 - protein, 9 aa, Artificial Sequence
  Peptide Derived from Human Papillomavirus
VVATDSYVK

SEQ ID NO: 39288 - protein, 10 aa, Artificial Sequence
  Peptide Derived from Human Papillomavirus
VVATDSYVKR

SEQ ID NO: 39289 - protein, 10 aa, Artificial Sequence
  Peptide Derived from Human Papillomavirus
WACVGLEVGR

SEQ ID NO: 39290 - protein, 9 aa, Artificial Sequence
  Peptide Derived from Human Papillomavirus
WDVNLQDSF

SEQ ID NO: 39291 - protein, 10 aa, Artificial Sequence
  Peptide Derived from Human Papillomavirus
WFYLRREQLF

SEQ ID NO: 39292 - protein, 11 aa, Artificial Sequence
  Peptide Derived from Human Papillomavirus
WFYLRREQLFA

SEQ ID NO: 39293 - protein, 8 aa, Artificial Sequence
  Peptide Derived from Human Papillomavirus
WLQRAQGH

SEQ ID NO: 39294 - protein, 8 aa, Artificial Sequence
  Peptide Derived from Human Papillomavirus
WTKGAVCK

SEQ ID NO: 39295 - protein, 9 aa, Artificial Sequence
  Peptide Derived from Human Papillomavirus
YDARKINQY

SEQ ID NO: 39296 - protein, 11 aa, Artificial Sequence
  Peptide Derived from Human Papillomavirus
YDARKINQYLR

SEQ ID NO: 39297 - protein, 8 aa, Artificial Sequence
  Peptide Derived from Human Papillomavirus
YGDSMWFY

SEQ ID NO: 39298 - protein, 10 aa, Artificial Sequence
  Peptide Derived from Human Papillomavirus
YGDSMWFYLR

SEQ ID NO: 39299 - protein, 11 aa, Artificial Sequence
  Peptide Derived from Human Papillomavirus
YGDSMWFYLRR

SEQ ID NO: 39300 - protein, 11 aa, Artificial Sequence
  Peptide Derived from Human Papillomavirus
YGLCIFLDVGA

SEQ ID NO: 39301 - protein, 9 aa, Artificial Sequence
  Peptide Derived from Human Papillomavirus
YIYRDPPLH

SEQ ID NO: 39302 - protein, 10 aa, Artificial Sequence
  Peptide Derived from Human Papillomavirus
YIYRDPPLHY

SEQ ID NO: 39303 - protein, 8 aa, Artificial Sequence
  Peptide Derived from Human Papillomavirus
YLKGSNGR

SEQ ID NO: 39304 - protein, 8 aa, Artificial Sequence
  Peptide Derived from Human Papillomavirus
YLKMSADA

SEQ ID NO: 39305 - protein, 9 aa, Artificial Sequence
  Peptide Derived from Human Papillomavirus
YLKMSADAY

SEQ ID NO: 39306 - protein, 9 aa, Artificial Sequence
  Peptide Derived from Human Papillomavirus
YLPPTPVSK

SEQ ID NO: 39307 - protein, 8 aa, Artificial Sequence
  Peptide Derived from Human Papillomavirus
YLRHVEEY

SEQ ID NO: 39308 - protein, 8 aa, Artificial Sequence
  Peptide Derived from Human Papillomavirus
YLRREQLF

SEQ ID NO: 39309 - protein, 9 aa, Artificial Sequence
  Peptide Derived from Human Papillomavirus
YLRREQLFA

SEQ ID NO: 39310 - protein, 10 aa, Artificial Sequence
  Peptide Derived from Human Papillomavirus
YLRREQLFAR

SEQ ID NO: 39311 - protein, 11 aa, Artificial Sequence
  Peptide Derived from Human Papillomavirus
YLRREQLFARH

SEQ ID NO: 39312 - protein, 9 aa, Artificial Sequence
  Peptide Derived from Human Papillomavirus
YSVTKDNTK

SEQ ID NO: 39313 - protein, 8 aa, Artificial Sequence
  Peptide Derived from Human Papillomavirus
YVKRTSIF

SEQ ID NO: 39314 - protein, 9 aa, Artificial Sequence
  Peptide Derived from Human Papillomavirus
YVKRTSIFY

SEQ ID NO: 39315 - protein, 10 aa, Artificial Sequence
  Peptide Derived from Human Papillomavirus
YVKRTSIFYH

SEQ ID NO: 39316 - protein, 11 aa, Artificial Sequence
  Peptide Derived from Human Papillomavirus
YVKRTSIFYHA

SEQ ID NO: 39317 - protein, 11 aa, Artificial Sequence
  Peptide Derived from Human Papillomavirus
YVRSTAITCQR

SEQ ID NO: 39318 - protein, 8 aa, Artificial Sequence
  Peptide Derived from Human Papillomavirus
AAPRLYRK

SEQ ID NO: 39319 - protein, 9 aa, Artificial Sequence
  Peptide Derived from Human Papillomavirus
AAPRLYRKA

SEQ ID NO: 39320 - protein, 10 aa, Artificial Sequence
  Peptide Derived from Human Papillomavirus
AAPRLYRKAF

SEQ ID NO: 39321 - protein, 11 aa, Artificial Sequence
  Peptide Derived from Human Papillomavirus
ADKILQWGSLF

SEQ ID NO: 39322 - protein, 11 aa, Artificial Sequence
  Peptide Derived from Human Papillomavirus
AFQQVKVTDPA

SEQ ID NO: 39323 - protein, 8 aa, Artificial Sequence
  Peptide Derived from Human Papillomavirus
AFSPSGVA

SEQ ID NO: 39324 - protein, 10 aa, Artificial Sequence
  Peptide Derived from Human Papillomavirus
AFTTRRGGVR

SEQ ID NO: 39325 - protein, 11 aa, Artificial Sequence
  Peptide Derived from Human Papillomavirus
AFTTRRGGVRF

SEQ ID NO: 39326 - protein, 9 aa, Artificial Sequence
  Peptide Derived from Human Papillomavirus
AGYVPLGSR

SEQ ID NO: 39327 - protein, 10 aa, Artificial Sequence
  Peptide Derived from Human Papillomavirus
ALHRPAFTTR

SEQ ID NO: 39328 - protein, 11 aa, Artificial Sequence
  Peptide Derived from Human Papillomavirus
ALHRPAFTTRR

SEQ ID NO: 39329 - protein, 8 aa, Artificial Sequence
  Peptide Derived from Human Papillomavirus
ALWPVYFF

SEQ ID NO: 39330 - protein, 9 aa, Artificial Sequence
  Peptide Derived from Human Papillomavirus
ALWPVYFFR

SEQ ID NO: 39331 - protein, 10 aa, Artificial Sequence
  Peptide Derived from Human Papillomavirus
ALWPVYFFRR

SEQ ID NO: 39332 - protein, 11 aa, Artificial Sequence
  Peptide Derived from Human Papillomavirus
ALWPVYFFRRR

SEQ ID NO: 39333 - protein, 8 aa, Artificial Sequence
  Peptide Derived from Human Papillomavirus
ASATQLYK

SEQ ID NO: 39334 - protein, 11 aa, Artificial Sequence
  Peptide Derived from Human Papillomavirus
ASATQLYKTCK

SEQ ID NO: 39335 - protein, 9 aa, Artificial Sequence
  Peptide Derived from Human Papillomavirus
ASNTTNVTA

SEQ ID NO: 39336 - protein, 11 aa, Artificial Sequence
  Peptide Derived from Human Papillomavirus
ATLVSADNPLF

SEQ ID NO: 39337 - protein, 10 aa, Artificial Sequence
  Peptide Derived from Human Papillomavirus
ATPSAHLPIK

SEQ ID NO: 39338 - protein, 9 aa, Artificial Sequence
  Peptide Derived from Human Papillomavirus
ATQLYKTCK

SEQ ID NO: 39339 - protein, 9 aa, Artificial Sequence
  Peptide Derived from Human Papillomavirus
ATRRKRASA

SEQ ID NO: 39340 - protein, 9 aa, Artificial Sequence
  Peptide Derived from Human Papillomavirus
DFMNIVALH

SEQ ID NO: 39341 - protein, 10 aa, Artificial Sequence
  Peptide Derived from Human Papillomavirus
DFMNIVALHR

SEQ ID NO: 39342 - protein, 8 aa, Artificial Sequence
  Peptide Derived from Human Papillomavirus
DGLYDIYA

SEQ ID NO: 39343 - protein, 8 aa, Artificial Sequence
  Peptide Derived from Human Papillomavirus
DISPIAQA

SEQ ID NO: 39344 - protein, 10 aa, Artificial Sequence
  Peptide Derived from Human Papillomavirus
DITPTSSTVH

SEQ ID NO: 39345 - protein, 10 aa, Artificial Sequence
  Peptide Derived from Human Papillomavirus
DIYANIDDEA

SEQ ID NO: 39346 - protein, 9 aa, Artificial Sequence
  Peptide Derived from Human Papillomavirus
DVVNKIEQK

SEQ ID NO: 39347 - protein, 9 aa, Artificial Sequence
  Peptide Derived from Human Papillomavirus
DVYIQGSSF

SEQ ID NO: 39348 - protein, 10 aa, Artificial Sequence
  Peptide Derived from Human Papillomavirus
DVYIQGSSFA

SEQ ID NO: 39349 - protein, 11 aa, Artificial Sequence
  Peptide Derived from Human Papillomavirus
EAPGLSSQSVA

SEQ ID NO: 39350 - protein, 10 aa, Artificial Sequence
  Peptide Derived from Human Papillomavirus
EDVVNKIEQK

SEQ ID NO: 39351 - protein, 8 aa, Artificial Sequence
  Peptide Derived from Human Papillomavirus
EGTDTSLA

SEQ ID NO: 39352 - protein, 9 aa, Artificial Sequence
  Peptide Derived from Human Papillomavirus
EGTDTSLAF

SEQ ID NO: 39353 - protein, 10 aa, Artificial Sequence
  Peptide Derived from Human Papillomavirus
EIEMQPLLSA

SEQ ID NO: 39354 - protein, 8 aa, Artificial Sequence
  Peptide Derived from Human Papillomavirus
EIPMQTFA

SEQ ID NO: 39355 - protein, 10 aa, Artificial Sequence
  Peptide Derived from Human Papillomavirus
EIPMQTFAVH

SEQ ID NO: 39356 - protein, 11 aa, Artificial Sequence
  Peptide Derived from Human Papillomavirus
EITSSSTTTPA

SEQ ID NO: 39357 - protein, 8 aa, Artificial Sequence
  Peptide Derived from Human Papillomavirus
EMQPLLSA

SEQ ID NO: 39358 - protein, 9 aa, Artificial Sequence
  Peptide Derived from Human Papillomavirus
ESGAGIPNF

SEQ ID NO: 39359 - protein, 9 aa, Artificial Sequence
  Peptide Derived from Human Papillomavirus
ESSVIESGA

SEQ ID NO: 39360 - protein, 8 aa, Artificial Sequence
  Peptide Derived from Human Papillomavirus
FADGDVAA

SEQ ID NO: 39361 - protein, 8 aa, Artificial Sequence
  Peptide Derived from Human Papillomavirus
FALWPVYF

SEQ ID NO: 39362 - protein, 9 aa, Artificial Sequence
  Peptide Derived from Human Papillomavirus
FALWPVYFF

SEQ ID NO: 39363 - protein, 10 aa, Artificial Sequence
  Peptide Derived from Human Papillomavirus
FALWPVYFFR

SEQ ID NO: 39364 - protein, 11 aa, Artificial Sequence
  Peptide Derived from Human Papillomavirus
FALWPVYFFRR

SEQ ID NO: 39365 - protein, 10 aa, Artificial Sequence
  Peptide Derived from Human Papillomavirus
FASNTTNVTA

SEQ ID NO: 39366 - protein, 8 aa, Artificial Sequence
  Peptide Derived from Human Papillomavirus
FDGLYDIY

SEQ ID NO: 39367 - protein, 9 aa, Artificial Sequence
  Peptide Derived from Human Papillomavirus
FDGLYDIYA

SEQ ID NO: 39368 - protein, 8 aa, Artificial Sequence
  Peptide Derived from Human Papillomavirus
FFADGDVA

SEQ ID NO: 39369 - protein, 9 aa, Artificial Sequence
  Peptide Derived from Human Papillomavirus
FFADGDVAA

SEQ ID NO: 39370 - protein, 8 aa, Artificial Sequence
  Peptide Derived from Human Papillomavirus
FFRRRRRK

SEQ ID NO: 39371 - protein, 9 aa, Artificial Sequence
  Peptide Derived from Human Papillomavirus
FFRRRRRKR

SEQ ID NO: 39372 - protein, 9 aa, Artificial Sequence
  Peptide Derived from Human Papillomavirus
FIDPPVIEA

SEQ ID NO: 39373 - protein, 11 aa, Artificial Sequence
  Peptide Derived from Human Papillomavirus
FLDRPATLVSA

SEQ ID NO: 39374 - protein, 8 aa, Artificial Sequence
  Peptide Derived from Human Papillomavirus
FMNIVALH

SEQ ID NO: 39375 - protein, 9 aa, Artificial Sequence
  Peptide Derived from Human Papillomavirus
FMNIVALHR

SEQ ID NO: 39376 - protein, 11 aa, Artificial Sequence
  Peptide Derived from Human Papillomavirus
FMNIVALHRPA

SEQ ID NO: 39377 - protein, 8 aa, Artificial Sequence
  Peptide Derived from Human Papillomavirus
FSRLGRKA

SEQ ID NO: 39378 - protein, 9 aa, Artificial Sequence
  Peptide Derived from Human Papillomavirus
FTTRRGGVR

SEQ ID NO: 39379 - protein, 10 aa, Artificial Sequence
  Peptide Derived from Human Papillomavirus
FTTRRGGVRF

SEQ ID NO: 39380 - protein, 11 aa, Artificial Sequence
  Peptide Derived from Human Papillomavirus
FVPQSPYDVTH

SEQ ID NO: 39381 - protein, 8 aa, Artificial Sequence
  Peptide Derived from Human Papillomavirus
GARVHYYY

SEQ ID NO: 39382 - protein, 9 aa, Artificial Sequence
  Peptide Derived from Human Papillomavirus
GFRRIAAPR

SEQ ID NO: 39383 - protein, 11 aa, Artificial Sequence
  Peptide Derived from Human Papillomavirus
GFRRIAAPRLY

SEQ ID NO: 39384 - protein, 10 aa, Artificial Sequence
  Peptide Derived from Human Papillomavirus
GGVRFSRLGR

SEQ ID NO: 39385 - protein, 11 aa, Artificial Sequence
  Peptide Derived from Human Papillomavirus
GGVRFSRLGRK

SEQ ID NO: 39386 - protein, 11 aa, Artificial Sequence
  Peptide Derived from Human Papillomavirus
GIGTGTGSGGR

SEQ ID NO: 39387 - protein, 11 aa, Artificial Sequence
  Peptide Derived from Human Papillomavirus
GIPNFTGSGGF

SEQ ID NO: 39388 - protein, 8 aa, Artificial Sequence
  Peptide Derived from Human Papillomavirus
GLSSQSVA

SEQ ID NO: 39389 - protein, 8 aa, Artificial Sequence
  Peptide Derived from Human Papillomavirus
GSGGRAGY

SEQ ID NO: 39390 - protein, 10 aa, Artificial Sequence
  Peptide Derived from Human Papillomavirus
GSSFALWPVY

SEQ ID NO: 39391 - protein, 11 aa, Artificial Sequence
  Peptide Derived from Human Papillomavirus
GSSFALWPVYF

SEQ ID NO: 39392 - protein, 10 aa, Artificial Sequence
  Peptide Derived from Human Papillomavirus
GTCPEDVVNK

SEQ ID NO: 39393 - protein, 8 aa, Artificial Sequence
  Peptide Derived from Human Papillomavirus
GTDTSLAF

SEQ ID NO: 39394 - protein, 8 aa, Artificial Sequence
  Peptide Derived from Human Papillomavirus
GTGSGGRA

SEQ ID NO: 39395 - protein, 10 aa, Artificial Sequence
  Peptide Derived from Human Papillomavirus
GTGSGGRAGY

SEQ ID NO: 39396 - protein, 9 aa, Artificial Sequence
  Peptide Derived from Human Papillomavirus
GTGTGSGGR

SEQ ID NO: 39397 - protein, 10 aa, Artificial Sequence
  Peptide Derived from Human Papillomavirus
GTGTGSGGRA

SEQ ID NO: 39398 - protein, 9 aa, Artificial Sequence
  Peptide Derived from Human Papillomavirus
GTQIGARVH

SEQ ID NO: 39399 - protein, 10 aa, Artificial Sequence
  Peptide Derived from Human Papillomavirus
GTQIGARVHY

SEQ ID NO: 39400 - protein, 11 aa, Artificial Sequence
  Peptide Derived from Human Papillomavirus
GTQIGARVHYY

SEQ ID NO: 39401 - protein, 8 aa, Artificial Sequence
  Peptide Derived from Human Papillomavirus
GVAPDPDF

SEQ ID NO: 39402 - protein, 9 aa, Artificial Sequence
  Peptide Derived from Human Papillomavirus
GVRFSRLGR

SEQ ID NO: 39403 - protein, 10 aa, Artificial Sequence
  Peptide Derived from Human Papillomavirus
GVRFSRLGRK

SEQ ID NO: 39404 - protein, 11 aa, Artificial Sequence
  Peptide Derived from Human Papillomavirus
GVRFSRLGRKA

SEQ ID NO: 39405 - protein, 10 aa, Artificial Sequence
  Peptide Derived from Human Papillomavirus
HDVYIQGSSF

SEQ ID NO: 39406 - protein, 11 aa, Artificial Sequence
  Peptide Derived from Human Papillomavirus
HDVYIQGSSFA

SEQ ID NO: 39407 - protein, 11 aa, Artificial Sequence
  Peptide Derived from Human Papillomavirus
HLPIKPSTLSF

SEQ ID NO: 39408 - protein, 11 aa, Artificial Sequence
  Peptide Derived from Human Papillomavirus
HSYEEIPMQTF

SEQ ID NO: 39409 - protein, 8 aa, Artificial Sequence
  Peptide Derived from Human Papillomavirus
IAAPRLYR

SEQ ID NO: 39410 - protein, 9 aa, Artificial Sequence
  Peptide Derived from Human Papillomavirus
IAAPRLYRK

SEQ ID NO: 39411 - protein, 10 aa, Artificial Sequence
  Peptide Derived from Human Papillomavirus
IAAPRLYRKA

SEQ ID NO: 39412 - protein, 11 aa, Artificial Sequence
  Peptide Derived from Human Papillomavirus
IAAPRLYRKAF

SEQ ID NO: 39413 - protein, 8 aa, Artificial Sequence
  Peptide Derived from Human Papillomavirus
IDPPVIEA

SEQ ID NO: 39414 - protein, 8 aa, Artificial Sequence
  Peptide Derived from Human Papillomavirus
IGARVHYY

SEQ ID NO: 39415 - protein, 9 aa, Artificial Sequence
  Peptide Derived from Human Papillomavirus
IGARVHYYY

SEQ ID NO: 39416 - protein, 10 aa, Artificial Sequence
  Peptide Derived from Human Papillomavirus
IGTGTGSGGR

SEQ ID NO: 39417 - protein, 11 aa, Artificial Sequence
  Peptide Derived from Human Papillomavirus
IGTGTGSGGRA

SEQ ID NO: 39418 - protein, 11 aa, Artificial Sequence
  Peptide Derived from Human Papillomavirus
ILISTPTSGIH

SEQ ID NO: 39419 - protein, 8 aa, Artificial Sequence
  Peptide Derived from Human Papillomavirus
ILQWGSLF

SEQ ID NO: 39420 - protein, 10 aa, Artificial Sequence
  Peptide Derived from Human Papillomavirus
ILQWGSLFTY

SEQ ID NO: 39421 - protein, 11 aa, Artificial Sequence
  Peptide Derived from Human Papillomavirus
ILQWGSLFTYF

SEQ ID NO: 39422 - protein, 9 aa, Artificial Sequence
  Peptide Derived from Human Papillomavirus
ISSTPIPGF

SEQ ID NO: 39423 - protein, 10 aa, Artificial Sequence
  Peptide Derived from Human Papillomavirus
ISSTPIPGFR

SEQ ID NO: 39424 - protein, 11 aa, Artificial Sequence
  Peptide Derived from Human Papillomavirus
ISSTPIPGFRR

SEQ ID NO: 39425 - protein, 9 aa, Artificial Sequence
  Peptide Derived from Human Papillomavirus
ISTPTSGIH

SEQ ID NO: 39426 - protein, 11 aa, Artificial Sequence
  Peptide Derived from Human Papillomavirus
ISTPTSGIHSY

SEQ ID NO: 39427 - protein, 9 aa, Artificial Sequence
  Peptide Derived from Human Papillomavirus
ITPTSSTVH

SEQ ID NO: 39428 - protein, 10 aa, Artificial Sequence
  Peptide Derived from Human Papillomavirus
ITSSSTTTPA

SEQ ID NO: 39429 - protein, 8 aa, Artificial Sequence
  Peptide Derived from Human Papillomavirus
IVALHRPA

SEQ ID NO: 39430 - protein, 9 aa, Artificial Sequence
  Peptide Derived from Human Papillomavirus
IVALHRPAF

SEQ ID NO: 39431 - protein, 8 aa, Artificial Sequence
  Peptide Derived from Human Papillomavirus
IVDVTPAR

SEQ ID NO: 39432 - protein, 8 aa, Artificial Sequence
  Peptide Derived from Human Papillomavirus
KATIQTRR

SEQ ID NO: 39433 - protein, 8 aa, Artificial Sequence
  Peptide Derived from Human Papillomavirus
KIEQKTWA

SEQ ID NO: 39434 - protein, 10 aa, Artificial Sequence
  Peptide Derived from Human Papillomavirus
KIEQKTWADK

SEQ ID NO: 39435 - protein, 9 aa, Artificial Sequence
  Peptide Derived from Human Papillomavirus
KILQWGSLF

SEQ ID NO: 39436 - protein, 11 aa, Artificial Sequence
  Peptide Derived from Human Papillomavirus
KILQWGSLFTY

SEQ ID NO: 39437 - protein, 10 aa, Artificial Sequence
  Peptide Derived from Human Papillomavirus
KVTDPAFLDR

SEQ ID NO: 39438 - protein, 9 aa, Artificial Sequence
  Peptide Derived from Human Papillomavirus
LAFSPSGVA

SEQ ID NO: 39439 - protein, 11 aa, Artificial Sequence
  Peptide Derived from Human Papillomavirus
LDITPTSSTVH

SEQ ID NO: 39440 - protein, 10 aa, Artificial Sequence
  Peptide Derived from Human Papillomavirus
LDRPATLVSA

SEQ ID NO: 39441 - protein, 10 aa, Artificial Sequence
  Peptide Derived from Human Papillomavirus
LFEGTDTSLA

SEQ ID NO: 39442 - protein, 11 aa, Artificial Sequence
  Peptide Derived from Human Papillomavirus
LFEGTDTSLAF

SEQ ID NO: 39443 - protein, 10 aa, Artificial Sequence
  Peptide Derived from Human Papillomavirus
LFIDPPVIEA

SEQ ID NO: 39444 - protein, 9 aa, Artificial Sequence
  Peptide Derived from Human Papillomavirus
LGNVWETPF

SEQ ID NO: 39445 - protein, 10 aa, Artificial Sequence
  Peptide Derived from Human Papillomavirus
LGNVWETPFY

SEQ ID NO: 39446 - protein, 10 aa, Artificial Sequence
  Peptide Derived from Human Papillomavirus
LGRKATIQTR

SEQ ID NO: 39447 - protein, 11 aa, Artificial Sequence
  Peptide Derived from Human Papillomavirus
LGRKATIQTRR

SEQ ID NO: 39448 - protein, 10 aa, Artificial Sequence
  Peptide Derived from Human Papillomavirus
LISTPTSGIH

SEQ ID NO: 39449 - protein, 8 aa, Artificial Sequence
  Peptide Derived from Human Papillomavirus
LLSANNSF

SEQ ID NO: 39450 - protein, 11 aa, Artificial Sequence
  Peptide Derived from Human Papillomavirus
LSANNSFDGLY

SEQ ID NO: 39451 - protein, 11 aa, Artificial Sequence
  Peptide Derived from Human Papillomavirus
LSSQSVATPSA

SEQ ID NO: 39452 - protein, 9 aa, Artificial Sequence
  Peptide Derived from Human Papillomavirus
LVSADNPLF

SEQ ID NO: 39453 - protein, 8 aa, Artificial Sequence
  Peptide Derived from Human Papillomavirus
MVAHRATR

SEQ ID NO: 39454 - protein, 9 aa, Artificial Sequence
  Peptide Derived from Human Papillomavirus
MVAHRATRR

SEQ ID NO: 39455 - protein, 10 aa, Artificial Sequence
  Peptide Derived from Human Papillomavirus
MVAHRATRRK

SEQ ID NO: 39456 - protein, 11 aa, Artificial Sequence
  Peptide Derived from Human Papillomavirus
MVAHRATRRKR

SEQ ID NO: 39457 - protein, 8 aa, Artificial Sequence
  Peptide Derived from Human Papillomavirus
NFTGSGGF

SEQ ID NO: 39458 - protein, 9 aa, Artificial Sequence
  Peptide Derived from Human Papillomavirus
NIVALHRPA

SEQ ID NO: 39459 - protein, 10 aa, Artificial Sequence
  Peptide Derived from Human Papillomavirus
NIVALHRPAF

SEQ ID NO: 39460 - protein, 10 aa, Artificial Sequence
  Peptide Derived from Human Papillomavirus
NSFDGLYDIY

SEQ ID NO: 39461 - protein, 11 aa, Artificial Sequence
  Peptide Derived from Human Papillomavirus
NSFDGLYDIYA

SEQ ID NO: 39462 - protein, 8 aa, Artificial Sequence
  Peptide Derived from Human Papillomavirus
NVWETPFY

SEQ ID NO: 39463 - protein, 8 aa, Artificial Sequence
  Peptide Derived from Human Papillomavirus
PAFLDRPA

SEQ ID NO: 39464 - protein, 11 aa, Artificial Sequence
  Peptide Derived from Human Papillomavirus
PAFTTRRGGVR

SEQ ID NO: 39465 - protein, 8 aa, Artificial Sequence
  Peptide Derived from Human Papillomavirus
PDFMNIVA

SEQ ID NO: 39466 - protein, 10 aa, Artificial Sequence
  Peptide Derived from Human Papillomavirus
PDFMNIVALH

SEQ ID NO: 39467 - protein, 11 aa, Artificial Sequence
  Peptide Derived from Human Papillomavirus
PDFMNIVALHR

SEQ ID NO: 39468 - protein, 10 aa, Artificial Sequence
  Peptide Derived from Human Papillomavirus
PDPDFMNIVA

SEQ ID NO: 39469 - protein, 8 aa, Artificial Sequence
  Peptide Derived from Human Papillomavirus
PFVPQSPY

SEQ ID NO: 39470 - protein, 8 aa, Artificial Sequence
  Peptide Derived from Human Papillomavirus
PGFRRIAA

SEQ ID NO: 39471 - protein, 10 aa, Artificial Sequence
  Peptide Derived from Human Papillomavirus
PGFRRIAAPR

SEQ ID NO: 39472 - protein, 9 aa, Artificial Sequence
  Peptide Derived from Human Papillomavirus
PGLSSQSVA

SEQ ID NO: 39473 - protein, 9 aa, Artificial Sequence
  Peptide Derived from Human Papillomavirus
PIKPSTLSF

SEQ ID NO: 39474 - protein, 10 aa, Artificial Sequence
  Peptide Derived from Human Papillomavirus
PIKPSTLSFA

SEQ ID NO: 39475 - protein, 9 aa, Artificial Sequence
  Peptide Derived from Human Papillomavirus
PIPGFRRIA

SEQ ID NO: 39476 - protein, 10 aa, Artificial Sequence
  Peptide Derived from Human Papillomavirus
PIPGFRRIAA

SEQ ID NO: 39477 - protein, 10 aa, Artificial Sequence
  Peptide Derived from Human Papillomavirus
PISSTPIPGF

SEQ ID NO: 39478 - protein, 11 aa, Artificial Sequence
  Peptide Derived from Human Papillomavirus
PISSTPIPGFR

SEQ ID NO: 39479 - protein, 11 aa, Artificial Sequence
  Peptide Derived from Human Papillomavirus
PLFEGTDTSLA

SEQ ID NO: 39480 - protein, 11 aa, Artificial Sequence
  Peptide Derived from Human Papillomavirus
PLFIDPPVIEA

SEQ ID NO: 39481 - protein, 10 aa, Artificial Sequence
  Peptide Derived from Human Papillomavirus
PLGNVWETPF

SEQ ID NO: 39482 - protein, 11 aa, Artificial Sequence
  Peptide Derived from Human Papillomavirus
PLGNVWETPFY

SEQ ID NO: 39483 - protein, 9 aa, Artificial Sequence
  Peptide Derived from Human Papillomavirus
PLLSANNSF

SEQ ID NO: 39484 - protein, 8 aa, Artificial Sequence
  Peptide Derived from Human Papillomavirus
PMQTFAVH

SEQ ID NO: 39485 - protein, 8 aa, Artificial Sequence
  Peptide Derived from Human Papillomavirus
PSAHLPIK

SEQ ID NO: 39486 - protein, 10 aa, Artificial Sequence
  Peptide Derived from Human Papillomavirus
PSGVAPDPDF

SEQ ID NO: 39487 - protein, 10 aa, Artificial Sequence
  Peptide Derived from Human Papillomavirus
PSTIVDVTPA

SEQ ID NO: 39488 - protein, 11 aa, Artificial Sequence
  Peptide Derived from Human Papillomavirus
PSTIVDVTPAR

SEQ ID NO: 39489 - protein, 9 aa, Artificial Sequence
  Peptide Derived from Human Papillomavirus
PTGPSTWPF

SEQ ID NO: 39490 - protein, 8 aa, Artificial Sequence
  Peptide Derived from Human Papillomavirus
PTSGIHSY

SEQ ID NO: 39491 - protein, 8 aa, Artificial Sequence
  Peptide Derived from Human Papillomavirus
PVYFFRRR

SEQ ID NO: 39492 - protein, 9 aa, Artificial Sequence
  Peptide Derived from Human Papillomavirus
PVYFFRRRR

SEQ ID NO: 39493 - protein, 10 aa, Artificial Sequence
  Peptide Derived from Human Papillomavirus
PVYFFRRRRR

SEQ ID NO: 39494 - protein, 11 aa, Artificial Sequence
  Peptide Derived from Human Papillomavirus
PVYFFRRRRRK

SEQ ID NO: 39495 - protein, 11 aa, Artificial Sequence
  Peptide Derived from Human Papillomavirus
QGSSFALWPVY

SEQ ID NO: 39496 - protein, 8 aa, Artificial Sequence
  Peptide Derived from Human Papillomavirus
QIGARVHY

SEQ ID NO: 39497 - protein, 9 aa, Artificial Sequence
  Peptide Derived from Human Papillomavirus
QIGARVHYY

SEQ ID NO: 39498 - protein, 10 aa, Artificial Sequence
  Peptide Derived from Human Papillomavirus
QIGARVHYYY

SEQ ID NO: 39499 - protein, 8 aa, Artificial Sequence
  Peptide Derived from Human Papillomavirus
QSPYDVTH

SEQ ID NO: 39500 - protein, 11 aa, Artificial Sequence
  Peptide Derived from Human Papillomavirus
QSPYDVTHDVY

SEQ ID NO: 39501 - protein, 8 aa, Artificial Sequence
  Peptide Derived from Human Papillomavirus
QSVATPSA

SEQ ID NO: 39502 - protein, 9 aa, Artificial Sequence
  Peptide Derived from Human Papillomavirus
QSVATPSAH

SEQ ID NO: 39503 - protein, 10 aa, Artificial Sequence
  Peptide Derived from Human Papillomavirus
QTRRGTQIGA

SEQ ID NO: 39504 - protein, 11 aa, Artificial Sequence
  Peptide Derived from Human Papillomavirus
QTRRGTQIGAR

SEQ ID NO: 39505 - protein, 8 aa, Artificial Sequence
  Peptide Derived from Human Papillomavirus
QVKVTDPA

SEQ ID NO: 39506 - protein, 9 aa, Artificial Sequence
  Peptide Derived from Human Papillomavirus
QVKVTDPAF

SEQ ID NO: 39507 - protein, 10 aa, Artificial Sequence
  Peptide Derived from Human Papillomavirus
RAGYVPLGSR

SEQ ID NO: 39508 - protein, 8 aa, Artificial Sequence
  Peptide Derived from Human Papillomavirus
RASATQLY

SEQ ID NO: 39509 - protein, 9 aa, Artificial Sequence
  Peptide Derived from Human Papillomavirus
RASATQLYK

SEQ ID NO: 39510 - protein, 8 aa, Artificial Sequence
  Peptide Derived from Human Papillomavirus
RATRRKRA

SEQ ID NO: 39511 - protein, 10 aa, Artificial Sequence
  Peptide Derived from Human Papillomavirus
RATRRKRASA

SEQ ID NO: 39512 - protein, 8 aa, Artificial Sequence
  Peptide Derived from Human Papillomavirus
RFSRLGRK

SEQ ID NO: 39513 - protein, 9 aa, Artificial Sequence
  Peptide Derived from Human Papillomavirus
RFSRLGRKA

SEQ ID NO: 39514 - protein, 8 aa, Artificial Sequence
  Peptide Derived from Human Papillomavirus
RGGVRFSR

SEQ ID NO: 39515 - protein, 11 aa, Artificial Sequence
  Peptide Derived from Human Papillomavirus
RGGVRFSRLGR

SEQ ID NO: 39516 - protein, 8 aa, Artificial Sequence
  Peptide Derived from Human Papillomavirus
RGTQIGAR

SEQ ID NO: 39517 - protein, 10 aa, Artificial Sequence
  Peptide Derived from Human Papillomavirus
RGTQIGARVH

SEQ ID NO: 39518 - protein, 11 aa, Artificial Sequence
  Peptide Derived from Human Papillomavirus
RGTQIGARVHY

SEQ ID NO: 39519 - protein, 8 aa, Artificial Sequence
  Peptide Derived from Human Papillomavirus
RIAAPRLY

SEQ ID NO: 39520 - protein, 9 aa, Artificial Sequence
  Peptide Derived from Human Papillomavirus
RIAAPRLYR

SEQ ID NO: 39521 - protein, 10 aa, Artificial Sequence
  Peptide Derived from Human Papillomavirus
RIAAPRLYRK

SEQ ID NO: 39522 - protein, 11 aa, Artificial Sequence
  Peptide Derived from Human Papillomavirus
RIAAPRLYRKA

SEQ ID NO: 39523 - protein, 11 aa, Artificial Sequence
  Peptide Derived from Human Papillomavirus
RLGRKATIQTR

SEQ ID NO: 39524 - protein, 11 aa, Artificial Sequence
  Peptide Derived from Human Papillomavirus
RLYRKAFQQVK

SEQ ID NO: 39525 - protein, 10 aa, Artificial Sequence
  Peptide Derived from Human Papillomavirus
SANNSFDGLY

SEQ ID NO: 39526 - protein, 10 aa, Artificial Sequence
  Peptide Derived from Human Papillomavirus
SATQLYKTCK

SEQ ID NO: 39527 - protein, 8 aa, Artificial Sequence
  Peptide Derived from Human Papillomavirus
SFALWPVY

SEQ ID NO: 39528 - protein, 9 aa, Artificial Sequence
  Peptide Derived from Human Papillomavirus
SFALWPVYF

SEQ ID NO: 39529 - protein, 10 aa, Artificial Sequence
  Peptide Derived from Human Papillomavirus
SFALWPVYFF

SEQ ID NO: 39530 - protein, 11 aa, Artificial Sequence
  Peptide Derived from Human Papillomavirus
SFALWPVYFFR

SEQ ID NO: 39531 - protein, 11 aa, Artificial Sequence
  Peptide Derived from Human Papillomavirus
SFASNTTNVTA

SEQ ID NO: 39532 - protein, 9 aa, Artificial Sequence
  Peptide Derived from Human Papillomavirus
SFDGLYDIY

SEQ ID NO: 39533 - protein, 10 aa, Artificial Sequence
  Peptide Derived from Human Papillomavirus
SFDGLYDIYA

SEQ ID NO: 39534 - protein, 8 aa, Artificial Sequence
  Peptide Derived from Human Papillomavirus
SGAGIPNF

SEQ ID NO: 39535 - protein, 11 aa, Artificial Sequence
  Peptide Derived from Human Papillomavirus
SGTCPEDVVNK

SEQ ID NO: 39536 - protein, 9 aa, Artificial Sequence
  Peptide Derived from Human Papillomavirus
SGVAPDPDF

SEQ ID NO: 39537 - protein, 10 aa, Artificial Sequence
  Peptide Derived from Human Papillomavirus
SLAFSPSGVA

SEQ ID NO: 39538 - protein, 9 aa, Artificial Sequence
  Peptide Derived from Human Papillomavirus
SSFALWPVY

SEQ ID NO: 39539 - protein, 10 aa, Artificial Sequence
  Peptide Derived from Human Papillomavirus
SSFALWPVYF

SEQ ID NO: 39540 - protein, 11 aa, Artificial Sequence
  Peptide Derived from Human Papillomavirus
SSFALWPVYFF

SEQ ID NO: 39541 - protein, 10 aa, Artificial Sequence
  Peptide Derived from Human Papillomavirus
SSQSVATPSA

SEQ ID NO: 39542 - protein, 11 aa, Artificial Sequence
  Peptide Derived from Human Papillomavirus
SSQSVATPSAH

SEQ ID NO: 39543 - protein, 8 aa, Artificial Sequence
  Peptide Derived from Human Papillomavirus
SSSTTTPA

SEQ ID NO: 39544 - protein, 10 aa, Artificial Sequence
  Peptide Derived from Human Papillomavirus
SSTHITNPLF

SEQ ID NO: 39545 - protein, 8 aa, Artificial Sequence
  Peptide Derived from Human Papillomavirus
SSTPIPGF

SEQ ID NO: 39546 - protein, 9 aa, Artificial Sequence
  Peptide Derived from Human Papillomavirus
SSTPIPGFR

SEQ ID NO: 39547 - protein, 10 aa, Artificial Sequence
  Peptide Derived from Human Papillomavirus
SSTPIPGFRR

SEQ ID NO: 39548 - protein, 10 aa, Artificial Sequence
  Peptide Derived from Human Papillomavirus
SSTVHVSSTH

SEQ ID NO: 39549 - protein, 8 aa, Artificial Sequence
  Peptide Derived from Human Papillomavirus
SSVIESGA

SEQ ID NO: 39550 - protein, 9 aa, Artificial Sequence
  Peptide Derived from Human Papillomavirus
STHITNPLF

SEQ ID NO: 39551 - protein, 9 aa, Artificial Sequence
  Peptide Derived from Human Papillomavirus
STIVDVTPA

SEQ ID NO: 39552 - protein, 10 aa, Artificial Sequence
  Peptide Derived from Human Papillomavirus
STIVDVTPAR

SEQ ID NO: 39553 - protein, 8 aa, Artificial Sequence
  Peptide Derived from Human Papillomavirus
STPIPGFR

SEQ ID NO: 39554 - protein, 9 aa, Artificial Sequence
  Peptide Derived from Human Papillomavirus
STPIPGFRR

SEQ ID NO: 39555 - protein, 11 aa, Artificial Sequence
  Peptide Derived from Human Papillomavirus
STPIPGFRRIA

SEQ ID NO: 39556 - protein, 8 aa, Artificial Sequence
  Peptide Derived from Human Papillomavirus
STPTSGIH

SEQ ID NO: 39557 - protein, 10 aa, Artificial Sequence
  Peptide Derived from Human Papillomavirus
STPTSGIHSY

SEQ ID NO: 39558 - protein, 9 aa, Artificial Sequence
  Peptide Derived from Human Papillomavirus
STVHVSSTH

SEQ ID NO: 39559 - protein, 11 aa, Artificial Sequence
  Peptide Derived from Human Papillomavirus
STWPFVPQSPY

SEQ ID NO: 39560 - protein, 8 aa, Artificial Sequence
  Peptide Derived from Human Papillomavirus
SVATPSAH

SEQ ID NO: 39561 - protein, 9 aa, Artificial Sequence
  Peptide Derived from Human Papillomavirus
TCPEDVVNK

SEQ ID NO: 39562 - protein, 8 aa, Artificial Sequence
  Peptide Derived from Human Papillomavirus
TDPAFLDR

SEQ ID NO: 39563 - protein, 10 aa, Artificial Sequence
  Peptide Derived from Human Papillomavirus
TDPAFLDRPA

SEQ ID NO: 39564 - protein, 8 aa, Artificial Sequence
  Peptide Derived from Human Papillomavirus
TGPSTWPF

SEQ ID NO: 39565 - protein, 9 aa, Artificial Sequence
  Peptide Derived from Human Papillomavirus
TGSGGRAGY

SEQ ID NO: 39566 - protein, 8 aa, Artificial Sequence
  Peptide Derived from Human Papillomavirus
TGTGSGGR

SEQ ID NO: 39567 - protein, 9 aa, Artificial Sequence
  Peptide Derived from Human Papillomavirus
TGTGSGGRA

SEQ ID NO: 39568 - protein, 11 aa, Artificial Sequence
  Peptide Derived from Human Papillomavirus
TGTGSGGRAGY

SEQ ID NO: 39569 - protein, 8 aa, Artificial Sequence
  Peptide Derived from Human Papillomavirus
TIVDVTPA

SEQ ID NO: 39570 - protein, 9 aa, Artificial Sequence
  Peptide Derived from Human Papillomavirus
TIVDVTPAR

SEQ ID NO: 39571 - protein, 10 aa, Artificial Sequence
  Peptide Derived from Human Papillomavirus
TLVSADNPLF

SEQ ID NO: 39572 - protein, 11 aa, Artificial Sequence
  Peptide Derived from Human Papillomavirus
TSLAFSPSGVA

SEQ ID NO: 39573 - protein, 9 aa, Artificial Sequence
  Peptide Derived from Human Papillomavirus
TSSSTTTPA

SEQ ID NO: 39574 - protein, 11 aa, Artificial Sequence
  Peptide Derived from Human Papillomavirus
TSSTVHVSSTH

SEQ ID NO: 39575 - protein, 8 aa, Artificial Sequence
  Peptide Derived from Human Papillomavirus
TTRRGGVR

SEQ ID NO: 39576 - protein, 9 aa, Artificial Sequence
  Peptide Derived from Human Papillomavirus
TTRRGGVRF

SEQ ID NO: 39577 - protein, 11 aa, Artificial Sequence
  Peptide Derived from Human Papillomavirus
TTRRGGVRFSR

SEQ ID NO: 39578 - protein, 8 aa, Artificial Sequence
  Peptide Derived from Human Papillomavirus
TVHVSSTH

SEQ ID NO: 39579 - protein, 8 aa, Artificial Sequence
  Peptide Derived from Human Papillomavirus
VAHRATRR

SEQ ID NO: 39580 - protein, 9 aa, Artificial Sequence
  Peptide Derived from Human Papillomavirus
VAHRATRRK

SEQ ID NO: 39581 - protein, 10 aa, Artificial Sequence
  Peptide Derived from Human Papillomavirus
VAHRATRRKR

SEQ ID NO: 39582 - protein, 11 aa, Artificial Sequence
  Peptide Derived from Human Papillomavirus
VAHRATRRKRA

SEQ ID NO: 39583 - protein, 8 aa, Artificial Sequence
  Peptide Derived from Human Papillomavirus
VALHRPAF

SEQ ID NO: 39584 - protein, 11 aa, Artificial Sequence
  Peptide Derived from Human Papillomavirus
VALHRPAFTTR

SEQ ID NO: 39585 - protein, 11 aa, Artificial Sequence
  Peptide Derived from Human Papillomavirus
VATPSAHLPIK

SEQ ID NO: 39586 - protein, 11 aa, Artificial Sequence
  Peptide Derived from Human Papillomavirus
VIESGAGIPNF

SEQ ID NO: 39587 - protein, 11 aa, Artificial Sequence
  Peptide Derived from Human Papillomavirus
VLPTGPSTWPF

SEQ ID NO: 39588 - protein, 8 aa, Artificial Sequence
  Peptide Derived from Human Papillomavirus
VSADNPLF

SEQ ID NO: 39589 - protein, 11 aa, Artificial Sequence
  Peptide Derived from Human Papillomavirus
VSSTHITNPLF

SEQ ID NO: 39590 - protein, 9 aa, Artificial Sequence
  Peptide Derived from Human Papillomavirus
VTDPAFLDR

SEQ ID NO: 39591 - protein, 11 aa, Artificial Sequence
  Peptide Derived from Human Papillomavirus
VTDPAFLDRPA

SEQ ID NO: 39592 - protein, 8 aa, Artificial Sequence
  Peptide Derived from Human Papillomavirus
VVNKIEQK

SEQ ID NO: 39593 - protein, 11 aa, Artificial Sequence
  Peptide Derived from Human Papillomavirus
VVNKIEQKTWA

SEQ ID NO: 39594 - protein, 8 aa, Artificial Sequence
  Peptide Derived from Human Papillomavirus
WGSLFTYF

SEQ ID NO: 39595 - protein, 8 aa, Artificial Sequence
  Peptide Derived from Human Papillomavirus
YANIDDEA

SEQ ID NO: 39596 - protein, 9 aa, Artificial Sequence
  Peptide Derived from Human Papillomavirus
YDISPIAQA

SEQ ID NO: 39597 - protein, 11 aa, Artificial Sequence
  Peptide Derived from Human Papillomavirus
YDIYANIDDEA

SEQ ID NO: 39598 - protein, 8 aa, Artificial Sequence
  Peptide Derived from Human Papillomavirus
YDVTHDVY

SEQ ID NO: 39599 - protein, 9 aa, Artificial Sequence
  Peptide Derived from Human Papillomavirus
YFFADGDVA

SEQ ID NO: 39600 - protein, 10 aa, Artificial Sequence
  Peptide Derived from Human Papillomavirus
YFFADGDVAA

SEQ ID NO: 39601 - protein, 8 aa, Artificial Sequence
  Peptide Derived from Human Papillomavirus
YFFRRRRR

SEQ ID NO: 39602 - protein, 9 aa, Artificial Sequence
  Peptide Derived from Human Papillomavirus
YFFRRRRRK

SEQ ID NO: 39603 - protein, 10 aa, Artificial Sequence
  Peptide Derived from Human Papillomavirus
YFFRRRRRKR

SEQ ID NO: 39604 - protein, 8 aa, Artificial Sequence
  Peptide Derived from Human Papillomavirus
YIQGSSFA

SEQ ID NO: 39605 - protein, 8 aa, Artificial Sequence
  Peptide Derived from Human Papillomavirus
AAALYWYK

SEQ ID NO: 39606 - protein, 8 aa, Artificial Sequence
  Peptide Derived from Human Papillomavirus
AAMLAKFK

SEQ ID NO: 39607 - protein, 11 aa, Artificial Sequence
  Peptide Derived from Human Papillomavirus
AAMLAKFKELY

SEQ ID NO: 39608 - protein, 11 aa, Artificial Sequence
  Peptide Derived from Human Papillomavirus
ADSIKTLLQQY

SEQ ID NO: 39609 - protein, 10 aa, Artificial Sequence
  Peptide Derived from Human Papillomavirus
AFLKSNSQAK

SEQ ID NO: 39610 - protein, 9 aa, Artificial Sequence
  Peptide Derived from Human Papillomavirus
AGTDSRWPY

SEQ ID NO: 39611 - protein, 11 aa, Artificial Sequence
  Peptide Derived from Human Papillomavirus
AGTDSRWPYLH

SEQ ID NO: 39612 - protein, 9 aa, Artificial Sequence
  Peptide Derived from Human Papillomavirus
AICIEKQSR

SEQ ID NO: 39613 - protein, 9 aa, Artificial Sequence
  Peptide Derived from Human Papillomavirus
ALFTAQEAK

SEQ ID NO: 39614 - protein, 11 aa, Artificial Sequence
  Peptide Derived from Human Papillomavirus
ALFTAQEAKQH

SEQ ID NO: 39615 - protein, 11 aa, Artificial Sequence
  Peptide Derived from Human Papillomavirus
ALKRFLQGIPK

SEQ ID NO: 39616 - protein, 10 aa, Artificial Sequence
  Peptide Derived from Human Papillomavirus
AMLAKFKELY

SEQ ID NO: 39617 - protein, 8 aa, Artificial Sequence
  Peptide Derived from Human Papillomavirus
ATMCRHYK

SEQ ID NO: 39618 - protein, 9 aa, Artificial Sequence
  Peptide Derived from Human Papillomavirus
ATMCRHYKR

SEQ ID NO: 39619 - protein, 8 aa, Artificial Sequence
  Peptide Derived from Human Papillomavirus
ATVPCWNY

SEQ ID NO: 39620 - protein, 8 aa, Artificial Sequence
  Peptide Derived from Human Papillomavirus
AVQVLKRK

SEQ ID NO: 39621 - protein, 9 aa, Artificial Sequence
  Peptide Derived from Human Papillomavirus
AVQVLKRKY

SEQ ID NO: 39622 - protein, 8 aa, Artificial Sequence
  Peptide Derived from Human Papillomavirus
CATMCRHY

SEQ ID NO: 39623 - protein, 9 aa, Artificial Sequence
  Peptide Derived from Human Papillomavirus
CATMCRHYK

SEQ ID NO: 39624 - protein, 10 aa, Artificial Sequence
  Peptide Derived from Human Papillomavirus
CATMCRHYKR

SEQ ID NO: 39625 - protein, 11 aa, Artificial Sequence
  Peptide Derived from Human Papillomavirus
CDRVDDGGDWK

SEQ ID NO: 39626 - protein, 8 aa, Artificial Sequence
  Peptide Derived from Human Papillomavirus
CFVNSKSH

SEQ ID NO: 39627 - protein, 10 aa, Artificial Sequence
  Peptide Derived from Human Papillomavirus
CGKNRETIEK

SEQ ID NO: 39628 - protein, 10 aa, Artificial Sequence
  Peptide Derived from Human Papillomavirus
CIEKQSRAAK

SEQ ID NO: 39629 - protein, 11 aa, Artificial Sequence
  Peptide Derived from Human Papillomavirus
CIEKQSRAAKR

SEQ ID NO: 39630 - protein, 8 aa, Artificial Sequence
  Peptide Derived from Human Papillomavirus
CMMIEPPK

SEQ ID NO: 39631 - protein, 10 aa, Artificial Sequence
  Peptide Derived from Human Papillomavirus
CMMIEPPKLR

SEQ ID NO: 39632 - protein, 9 aa, Artificial Sequence
  Peptide Derived from Human Papillomavirus
CVDNNISPR

SEQ ID NO: 39633 - protein, 11 aa, Artificial Sequence
  Peptide Derived from Human Papillomavirus
CVDNNISPRLK

SEQ ID NO: 39634 - protein, 9 aa, Artificial Sequence
  Peptide Derived from Human Papillomavirus
DATVPCWNY

SEQ ID NO: 39635 - protein, 8 aa, Artificial Sequence
  Peptide Derived from Human Papillomavirus
DAVQVLKR

SEQ ID NO: 39636 - protein, 9 aa, Artificial Sequence
  Peptide Derived from Human Papillomavirus
DAVQVLKRK

SEQ ID NO: 39637 - protein, 10 aa, Artificial Sequence
  Peptide Derived from Human Papillomavirus
DAVQVLKRKY

SEQ ID NO: 39638 - protein, 8 aa, Artificial Sequence
  Peptide Derived from Human Papillomavirus
DCATMCRH

SEQ ID NO: 39639 - protein, 9 aa, Artificial Sequence
  Peptide Derived from Human Papillomavirus
DCATMCRHY

SEQ ID NO: 39640 - protein, 10 aa, Artificial Sequence
  Peptide Derived from Human Papillomavirus
DCATMCRHYK

SEQ ID NO: 39641 - protein, 11 aa, Artificial Sequence
  Peptide Derived from Human Papillomavirus
DCATMCRHYKR

SEQ ID NO: 39642 - protein, 10 aa, Artificial Sequence
  Peptide Derived from Human Papillomavirus
DDATVPCWNY

SEQ ID NO: 39643 - protein, 8 aa, Artificial Sequence
  Peptide Derived from Human Papillomavirus
DDSEIAYK

SEQ ID NO: 39644 - protein, 9 aa, Artificial Sequence
  Peptide Derived from Human Papillomavirus
DDSEIAYKY

SEQ ID NO: 39645 - protein, 9 aa, Artificial Sequence
  Peptide Derived from Human Papillomavirus
DFIVNDNDY

SEQ ID NO: 39646 - protein, 9 aa, Artificial Sequence
  Peptide Derived from Human Papillomavirus
DGDSLPTFK

SEQ ID NO: 39647 - protein, 10 aa, Artificial Sequence
  Peptide Derived from Human Papillomavirus
DGNLVSMDVK

SEQ ID NO: 39648 - protein, 11 aa, Artificial Sequence
  Peptide Derived from Human Papillomavirus
DGNLVSMDVKH

SEQ ID NO: 39649 - protein, 10 aa, Artificial Sequence
  Peptide Derived from Human Papillomavirus
DIVDDSEIAY

SEQ ID NO: 39650 - protein, 11 aa, Artificial Sequence
  Peptide Derived from Human Papillomavirus
DIVDDSEIAYK

SEQ ID NO: 39651 - protein, 9 aa, Artificial Sequence
  Peptide Derived from Human Papillomavirus
DNNISPRLK

SEQ ID NO: 39652 - protein, 8 aa, Artificial Sequence
  Peptide Derived from Human Papillomavirus
DSEIAYKY

SEQ ID NO: 39653 - protein, 10 aa, Artificial Sequence
  Peptide Derived from Human Papillomavirus
DSIKTLLQQY

SEQ ID NO: 39654 - protein, 8 aa, Artificial Sequence
  Peptide Derived from Human Papillomavirus
DSRWPYLH

SEQ ID NO: 39655 - protein, 10 aa, Artificial Sequence
  Peptide Derived from Human Papillomavirus
DSRWPYLHNR

SEQ ID NO: 39656 - protein, 11 aa, Artificial Sequence
  Peptide Derived from Human Papillomavirus
DTNSNASAFLK

SEQ ID NO: 39657 - protein, 8 aa, Artificial Sequence
  Peptide Derived from Human Papillomavirus
DTPEWIQR

SEQ ID NO: 39658 - protein, 11 aa, Artificial Sequence
  Peptide Derived from Human Papillomavirus
DVKHRPLVQLK

SEQ ID NO: 39659 - protein, 10 aa, Artificial Sequence
  Peptide Derived from Human Papillomavirus
EFMSFLTALK

SEQ ID NO: 39660 - protein, 11 aa, Artificial Sequence
  Peptide Derived from Human Papillomavirus
EFMSFLTALKR

SEQ ID NO: 39661 - protein, 10 aa, Artificial Sequence
  Peptide Derived from Human Papillomavirus
EGTGCNGWFY

SEQ ID NO: 39662 - protein, 8 aa, Artificial Sequence
  Peptide Derived from Human Papillomavirus
ELNDKNWK

SEQ ID NO: 39663 - protein, 10 aa, Artificial Sequence
  Peptide Derived from Human Papillomavirus
ELSQMVQWAY

SEQ ID NO: 39664 - protein, 10 aa, Artificial Sequence
  Peptide Derived from Human Papillomavirus
ELVRPFKSNK

SEQ ID NO: 39665 - protein, 11 aa, Artificial Sequence
  Peptide Derived from Human Papillomavirus
ENDGDSLPTFK

SEQ ID NO: 39666 - protein, 9 aa, Artificial Sequence
  Peptide Derived from Human Papillomavirus
ETETPCSQY

SEQ ID NO: 39667 - protein, 9 aa, Artificial Sequence
  Peptide Derived from Human Papillomavirus
ETIEKLLSK

SEQ ID NO: 39668 - protein, 11 aa, Artificial Sequence
  Peptide Derived from Human Papillomavirus
ETQQMLQVEGR

SEQ ID NO: 39669 - protein, 9 aa, Artificial Sequence
  Peptide Derived from Human Papillomavirus
FDENGNPVY

SEQ ID NO: 39670 - protein, 8 aa, Artificial Sequence
  Peptide Derived from Human Papillomavirus
FFSRTWSR

SEQ ID NO: 39671 - protein, 8 aa, Artificial Sequence
  Peptide Derived from Human Papillomavirus
FIVNDNDY

SEQ ID NO: 39672 - protein, 9 aa, Artificial Sequence
  Peptide Derived from Human Papillomavirus
FLKSNSQAK

SEQ ID NO: 39673 - protein, 8 aa, Artificial Sequence
  Peptide Derived from Human Papillomavirus
FLQGIPKK

SEQ ID NO: 39674 - protein, 9 aa, Artificial Sequence
  Peptide Derived from Human Papillomavirus
FMSFLTALK

SEQ ID NO: 39675 - protein, 10 aa, Artificial Sequence
  Peptide Derived from Human Papillomavirus
FMSFLTALKR

SEQ ID NO: 39676 - protein, 9 aa, Artificial Sequence
  Peptide Derived from Human Papillomavirus
FSELVRPFK

SEQ ID NO: 39677 - protein, 11 aa, Artificial Sequence
  Peptide Derived from Human Papillomavirus
FSRTWSRLSLH

SEQ ID NO: 39678 - protein, 9 aa, Artificial Sequence
  Peptide Derived from Human Papillomavirus
FTAQEAKQH

SEQ ID NO: 39679 - protein, 10 aa, Artificial Sequence
  Peptide Derived from Human Papillomavirus
FTAQEAKQHR

SEQ ID NO: 39680 - protein, 10 aa, Artificial Sequence
  Peptide Derived from Human Papillomavirus
GCVDNNISPR

SEQ ID NO: 39681 - protein, 8 aa, Artificial Sequence
  Peptide Derived from Human Papillomavirus
GDSLPTFK

SEQ ID NO: 39682 - protein, 9 aa, Artificial Sequence
  Peptide Derived from Human Papillomavirus
GDTPEWIQR

SEQ ID NO: 39683 - protein, 11 aa, Artificial Sequence
  Peptide Derived from Human Papillomavirus
GDWKQIVMFLR

SEQ ID NO: 39684 - protein, 8 aa, Artificial Sequence
  Peptide Derived from Human Papillomavirus
GGEGVSER

SEQ ID NO: 39685 - protein, 9 aa, Artificial Sequence
  Peptide Derived from Human Papillomavirus
GGEGVSERH

SEQ ID NO: 39686 - protein, 10 aa, Artificial Sequence
  Peptide Derived from Human Papillomavirus
GGSGGGCSQY

SEQ ID NO: 39687 - protein, 11 aa, Artificial Sequence
  Peptide Derived from Human Papillomavirus
GIPKKNCILLY

SEQ ID NO: 39688 - protein, 9 aa, Artificial Sequence
  Peptide Derived from Human Papillomavirus
GISNISEVY

SEQ ID NO: 39689 - protein, 11 aa, Artificial Sequence
  Peptide Derived from Human Papillomavirus
GLTPSIADSIK

SEQ ID NO: 39690 - protein, 9 aa, Artificial Sequence
  Peptide Derived from Human Papillomavirus
GMVVLLLVR

SEQ ID NO: 39691 - protein, 10 aa, Artificial Sequence
  Peptide Derived from Human Papillomavirus
GMVVLLLVRY

SEQ ID NO: 39692 - protein, 11 aa, Artificial Sequence
  Peptide Derived from Human Papillomavirus
GMVVLLLVRYK

SEQ ID NO: 39693 - protein, 9 aa, Artificial Sequence
  Peptide Derived from Human Papillomavirus
GNLVSMDVK

SEQ ID NO: 39694 - protein, 10 aa, Artificial Sequence
  Peptide Derived from Human Papillomavirus
GNLVSMDVKH

SEQ ID NO: 39695 - protein, 11 aa, Artificial Sequence
  Peptide Derived from Human Papillomavirus
GNLVSMDVKHR

SEQ ID NO: 39696 - protein, 10 aa, Artificial Sequence
  Peptide Derived from Human Papillomavirus
GNPVYELNDK

SEQ ID NO: 39697 - protein, 10 aa, Artificial Sequence
  Peptide Derived from Human Papillomavirus
GSGGEGVSER

SEQ ID NO: 39698 - protein, 11 aa, Artificial Sequence
  Peptide Derived from Human Papillomavirus
GSGGEGVSERH

SEQ ID NO: 39699 - protein, 9 aa, Artificial Sequence
  Peptide Derived from Human Papillomavirus
GSGGGCSQY

SEQ ID NO: 39700 - protein, 10 aa, Artificial Sequence
  Peptide Derived from Human Papillomavirus
GSVICFVNSK

SEQ ID NO: 39701 - protein, 8 aa, Artificial Sequence
  Peptide Derived from Human Papillomavirus
GTDSRWPY

SEQ ID NO: 39702 - protein, 10 aa, Artificial Sequence
  Peptide Derived from Human Papillomavirus
GTDSRWPYLH

SEQ ID NO: 39703 - protein, 9 aa, Artificial Sequence
  Peptide Derived from Human Papillomavirus
GTGCNGWFY

SEQ ID NO: 39704 - protein, 9 aa, Artificial Sequence
  Peptide Derived from Human Papillomavirus
GVSFSELVR

SEQ ID NO: 39705 - protein, 10 aa, Artificial Sequence
  Peptide Derived from Human Papillomavirus
HALFTAQEAK

SEQ ID NO: 39706 - protein, 11 aa, Artificial Sequence
  Peptide Derived from Human Papillomavirus
HFWLQPLADAK

SEQ ID NO: 39707 - protein, 9 aa, Artificial Sequence
  Peptide Derived from Human Papillomavirus
ICFVNSKSH

SEQ ID NO: 39708 - protein, 8 aa, Artificial Sequence
  Peptide Derived from Human Papillomavirus
ICIEKQSR

SEQ ID NO: 39709 - protein, 11 aa, Artificial Sequence
  Peptide Derived from Human Papillomavirus
ICIEKQSRAAK

SEQ ID NO: 39710 - protein, 11 aa, Artificial Sequence
  Peptide Derived from Human Papillomavirus
ILLYGAANTGK

SEQ ID NO: 39711 - protein, 11 aa, Artificial Sequence
  Peptide Derived from Human Papillomavirus
ILNVLKTSNAK

SEQ ID NO: 39712 - protein, 8 aa, Artificial Sequence
  Peptide Derived from Human Papillomavirus
INAGTDSR

SEQ ID NO: 39713 - protein, 11 aa, Artificial Sequence
  Peptide Derived from Human Papillomavirus
INAGTDSRWPY

SEQ ID NO: 39714 - protein, 8 aa, Artificial Sequence
  Peptide Derived from Human Papillomavirus
ISNISEVY

SEQ ID NO: 39715 - protein, 9 aa, Artificial Sequence
  Peptide Derived from Human Papillomavirus
IVDDSEIAY

SEQ ID NO: 39716 - protein, 10 aa, Artificial Sequence
  Peptide Derived from Human Papillomavirus
IVDDSEIAYK

SEQ ID NO: 39717 - protein, 11 aa, Artificial Sequence
  Peptide Derived from Human Papillomavirus
IVDDSEIAYKY

SEQ ID NO: 39718 - protein, 10 aa, Artificial Sequence
  Peptide Derived from Human Papillomavirus
IVKDCATMCR

SEQ ID NO: 39719 - protein, 11 aa, Artificial Sequence
  Peptide Derived from Human Papillomavirus
IVKDCATMCRH

SEQ ID NO: 39720 - protein, 9 aa, Artificial Sequence
  Peptide Derived from Human Papillomavirus
KAAMLAKFK

SEQ ID NO: 39721 - protein, 10 aa, Artificial Sequence
  Peptide Derived from Human Papillomavirus
KAICIEKQSR

SEQ ID NO: 39722 - protein, 11 aa, Artificial Sequence
  Peptide Derived from Human Papillomavirus
KCGKNRETIEK

SEQ ID NO: 39723 - protein, 8 aa, Artificial Sequence
  Peptide Derived from Human Papillomavirus
KDCATMCR

SEQ ID NO: 39724 - protein, 9 aa, Artificial Sequence
  Peptide Derived from Human Papillomavirus
KDCATMCRH

SEQ ID NO: 39725 - protein, 10 aa, Artificial Sequence
  Peptide Derived from Human Papillomavirus
KDCATMCRHY

SEQ ID NO: 39726 - protein, 11 aa, Artificial Sequence
  Peptide Derived from Human Papillomavirus
KDCATMCRHYK

SEQ ID NO: 39727 - protein, 11 aa, Artificial Sequence
  Peptide Derived from Human Papillomavirus
KIVKDCATMCR

SEQ ID NO: 39728 - protein, 10 aa, Artificial Sequence
  Peptide Derived from Human Papillomavirus
KLRSTAAALY

SEQ ID NO: 39729 - protein, 8 aa, Artificial Sequence
  Peptide Derived from Human Papillomavirus
KNRETIEK

SEQ ID NO: 39730 - protein, 9 aa, Artificial Sequence
  Peptide Derived from Human Papillomavirus
KNWKSFFSR

SEQ ID NO: 39731 - protein, 10 aa, Artificial Sequence
  Peptide Derived from Human Papillomavirus
KSFFSRTWSR

SEQ ID NO: 39732 - protein, 10 aa, Artificial Sequence
  Peptide Derived from Human Papillomavirus
KSLFGMSLMK

SEQ ID NO: 39733 - protein, 10 aa, Artificial Sequence
  Peptide Derived from Human Papillomavirus
KSNSQAKIVK

SEQ ID NO: 39734 - protein, 11 aa, Artificial Sequence
  Peptide Derived from Human Papillomavirus
KTGISNISEVY

SEQ ID NO: 39735 - protein, 10 aa, Artificial Sequence
  Peptide Derived from Human Papillomavirus
KTLLQQYCLY

SEQ ID NO: 39736 - protein, 8 aa, Artificial Sequence
  Peptide Derived from Human Papillomavirus
LAKFKELY

SEQ ID NO: 39737 - protein, 11 aa, Artificial Sequence
  Peptide Derived from Human Papillomavirus
LDDATVPCWNY

SEQ ID NO: 39738 - protein, 11 aa, Artificial Sequence
  Peptide Derived from Human Papillomavirus
LDGNLVSMDVK

SEQ ID NO: 39739 - protein, 9 aa, Artificial Sequence
  Peptide Derived from Human Papillomavirus
LFESEDSGY

SEQ ID NO: 39740 - protein, 8 aa, Artificial Sequence
  Peptide Derived from Human Papillomavirus
LFGMSLMK

SEQ ID NO: 39741 - protein, 8 aa, Artificial Sequence
  Peptide Derived from Human Papillomavirus
LFTAQEAK

SEQ ID NO: 39742 - protein, 10 aa, Artificial Sequence
  Peptide Derived from Human Papillomavirus
LFTAQEAKQH

SEQ ID NO: 39743 - protein, 11 aa, Artificial Sequence
  Peptide Derived from Human Papillomavirus
LFTAQEAKQHR

SEQ ID NO: 39744 - protein, 10 aa, Artificial Sequence
  Peptide Derived from Human Papillomavirus
LLLVRYKCGK

SEQ ID NO: 39745 - protein, 8 aa, Artificial Sequence
  Peptide Derived from Human Papillomavirus
LLQQYCLY

SEQ ID NO: 39746 - protein, 10 aa, Artificial Sequence
  Peptide Derived from Human Papillomavirus
LLQQYCLYLH

SEQ ID NO: 39747 - protein, 9 aa, Artificial Sequence
  Peptide Derived from Human Papillomavirus
LLVRYKCGK

SEQ ID NO: 39748 - protein, 11 aa, Artificial Sequence
  Peptide Derived from Human Papillomavirus
LLVRYKCGKNR

SEQ ID NO: 39749 - protein, 10 aa, Artificial Sequence
  Peptide Derived from Human Papillomavirus
LLYGAANTGK

SEQ ID NO: 39750 - protein, 10 aa, Artificial Sequence
  Peptide Derived from Human Papillomavirus
LNVLKTSNAK

SEQ ID NO: 39751 - protein, 9 aa, Artificial Sequence
  Peptide Derived from Human Papillomavirus
LSLHEDEDK

SEQ ID NO: 39752 - protein, 9 aa, Artificial Sequence
  Peptide Derived from Human Papillomavirus
LSQMVQWAY

SEQ ID NO: 39753 - protein, 9 aa, Artificial Sequence
  Peptide Derived from Human Papillomavirus
LTNILNVLK

SEQ ID NO: 39754 - protein, 10 aa, Artificial Sequence
  Peptide Derived from Human Papillomavirus
LTPSIADSIK

SEQ ID NO: 39755 - protein, 10 aa, Artificial Sequence
  Peptide Derived from Human Papillomavirus
LTQAETETAH

SEQ ID NO: 39756 - protein, 11 aa, Artificial Sequence
  Peptide Derived from Human Papillomavirus
LVDFIVNDNDY

SEQ ID NO: 39757 - protein, 9 aa, Artificial Sequence
  Peptide Derived from Human Papillomavirus
LVRPFKSNK

SEQ ID NO: 39758 - protein, 8 aa, Artificial Sequence
  Peptide Derived from Human Papillomavirus
LVRYKCGK

SEQ ID NO: 39759 - protein, 10 aa, Artificial Sequence
  Peptide Derived from Human Papillomavirus
LVRYKCGKNR

SEQ ID NO: 39760 - protein, 8 aa, Artificial Sequence
  Peptide Derived from Human Papillomavirus
LVSMDVKH

SEQ ID NO: 39761 - protein, 9 aa, Artificial Sequence
  Peptide Derived from Human Papillomavirus
LVSMDVKHR

SEQ ID NO: 39762 - protein, 9 aa, Artificial Sequence
  Peptide Derived from Human Papillomavirus
MCMMIEPPK

SEQ ID NO: 39763 - protein, 11 aa, Artificial Sequence
  Peptide Derived from Human Papillomavirus
MCMMIEPPKLR

SEQ ID NO: 39764 - protein, 10 aa, Artificial Sequence
  Peptide Derived from Human Papillomavirus
MCRHYKRAEK

SEQ ID NO: 39765 - protein, 11 aa, Artificial Sequence
  Peptide Derived from Human Papillomavirus
MCRHYKRAEKK

SEQ ID NO: 39766 - protein, 8 aa, Artificial Sequence
  Peptide Derived from Human Papillomavirus
MIEPPKLR

SEQ ID NO: 39767 - protein, 9 aa, Artificial Sequence
  Peptide Derived from Human Papillomavirus
MLAKFKELY

SEQ ID NO: 39768 - protein, 8 aa, Artificial Sequence
  Peptide Derived from Human Papillomavirus
MLQVEGRH

SEQ ID NO: 39769 - protein, 9 aa, Artificial Sequence
  Peptide Derived from Human Papillomavirus
MMIEPPKLR

SEQ ID NO: 39770 - protein, 8 aa, Artificial Sequence
  Peptide Derived from Human Papillomavirus
MSFLTALK

SEQ ID NO: 39771 - protein, 9 aa, Artificial Sequence
  Peptide Derived from Human Papillomavirus
MSFLTALKR

SEQ ID NO: 39772 - protein, 8 aa, Artificial Sequence
  Peptide Derived from Human Papillomavirus
MSMSQWIK

SEQ ID NO: 39773 - protein, 9 aa, Artificial Sequence
  Peptide Derived from Human Papillomavirus
MSMSQWIKY

SEQ ID NO: 39774 - protein, 10 aa, Artificial Sequence
  Peptide Derived from Human Papillomavirus
MSMSQWIKYR

SEQ ID NO: 39775 - protein, 8 aa, Artificial Sequence
  Peptide Derived from Human Papillomavirus
MSQWIKYR

SEQ ID NO: 39776 - protein, 11 aa, Artificial Sequence
  Peptide Derived from Human Papillomavirus
MSQWIKYRCDR

SEQ ID NO: 39777 - protein, 8 aa, Artificial Sequence
  Peptide Derived from Human Papillomavirus
MVVLLLVR

SEQ ID NO: 39778 - protein, 9 aa, Artificial Sequence
  Peptide Derived from Human Papillomavirus
MVVLLLVRY

SEQ ID NO: 39779 - protein, 10 aa, Artificial Sequence
  Peptide Derived from Human Papillomavirus
MVVLLLVRYK

SEQ ID NO: 39780 - protein, 10 aa, Artificial Sequence
  Peptide Derived from Human Papillomavirus
NAGTDSRWPY

SEQ ID NO: 39781 - protein, 9 aa, Artificial Sequence
  Peptide Derived from Human Papillomavirus
NAKAAMLAK

SEQ ID NO: 39782 - protein, 11 aa, Artificial Sequence
  Peptide Derived from Human Papillomavirus
NAKAAMLAKFK

SEQ ID NO: 39783 - protein, 10 aa, Artificial Sequence
  Peptide Derived from Human Papillomavirus
NDGDSLPTFK

SEQ ID NO: 39784 - protein, 11 aa, Artificial Sequence
  Peptide Derived from Human Papillomavirus
NDIVDDSEIAY

SEQ ID NO: 39785 - protein, 11 aa, Artificial Sequence
  Peptide Derived from Human Papillomavirus
NDKNWKSFFSR

SEQ ID NO: 39786 - protein, 11 aa, Artificial Sequence
  Peptide Derived from Human Papillomavirus
NGNPVYELNDK

SEQ ID NO: 39787 - protein, 9 aa, Artificial Sequence
  Peptide Derived from Human Papillomavirus
NINAGTDSR

SEQ ID NO: 39788 - protein, 8 aa, Artificial Sequence
  Peptide Derived from Human Papillomavirus
NLVSMDVK

SEQ ID NO: 39789 - protein, 9 aa, Artificial Sequence
  Peptide Derived from Human Papillomavirus
NLVSMDVKH

SEQ ID NO: 39790 - protein, 10 aa, Artificial Sequence
  Peptide Derived from Human Papillomavirus
NLVSMDVKHR

SEQ ID NO: 39791 - protein, 8 aa, Artificial Sequence
  Peptide Derived from Human Papillomavirus
NNISPRLK

SEQ ID NO: 39792 - protein, 9 aa, Artificial Sequence
  Peptide Derived from Human Papillomavirus
NSNASAFLK

SEQ ID NO: 39793 - protein, 8 aa, Artificial Sequence
  Peptide Derived from Human Papillomavirus
NSQAKIVK

SEQ ID NO: 39794 - protein, 9 aa, Artificial Sequence
  Peptide Derived from Human Papillomavirus
NVLKTSNAK

SEQ ID NO: 39795 - protein, 11 aa, Artificial Sequence
  Peptide Derived from Human Papillomavirus
PCWNYIDDNLR

SEQ ID NO: 39796 - protein, 10 aa, Artificial Sequence
  Peptide Derived from Human Papillomavirus
PFDENGNPVY

SEQ ID NO: 39797 - protein, 10 aa, Artificial Sequence
  Peptide Derived from Human Papillomavirus
PLTNILNVLK

SEQ ID NO: 39798 - protein, 10 aa, Artificial Sequence
  Peptide Derived from Human Papillomavirus
PMCMMIEPPK

SEQ ID NO: 39799 - protein, 8 aa, Artificial Sequence
  Peptide Derived from Human Papillomavirus
PSIADSIK

SEQ ID NO: 39800 - protein, 8 aa, Artificial Sequence
  Peptide Derived from Human Papillomavirus
PVYELNDK

SEQ ID NO: 39801 - protein, 11 aa, Artificial Sequence
  Peptide Derived from Human Papillomavirus
PVYELNDKNWK

SEQ ID NO: 39802 - protein, 8 aa, Artificial Sequence
  Peptide Derived from Human Papillomavirus
QAETETAH

SEQ ID NO: 39803 - protein, 11 aa, Artificial Sequence
  Peptide Derived from Human Papillomavirus
QGSVICFVNSK

SEQ ID NO: 39804 - protein, 8 aa, Artificial Sequence
  Peptide Derived from Human Papillomavirus
QIVMFLRY

SEQ ID NO: 39805 - protein, 8 aa, Artificial Sequence
  Peptide Derived from Human Papillomavirus
QMLQVEGR

SEQ ID NO: 39806 - protein, 9 aa, Artificial Sequence
  Peptide Derived from Human Papillomavirus
QMLQVEGRH

SEQ ID NO: 39807 - protein, 9 aa, Artificial Sequence
  Peptide Derived from Human Papillomavirus
QMSMSQWIK

SEQ ID NO: 39808 - protein, 10 aa, Artificial Sequence
  Peptide Derived from Human Papillomavirus
QMSMSQWIKY

SEQ ID NO: 39809 - protein, 11 aa, Artificial Sequence
  Peptide Derived from Human Papillomavirus
QMSMSQWIKYR

SEQ ID NO: 39810 - protein, 8 aa, Artificial Sequence
  Peptide Derived from Human Papillomavirus
QSRAAKRR

SEQ ID NO: 39811 - protein, 8 aa, Artificial Sequence
  Peptide Derived from Human Papillomavirus
RDAVQVLK

SEQ ID NO: 39812 - protein, 9 aa, Artificial Sequence
  Peptide Derived from Human Papillomavirus
RDAVQVLKR

SEQ ID NO: 39813 - protein, 10 aa, Artificial Sequence
  Peptide Derived from Human Papillomavirus
RDAVQVLKRK

SEQ ID NO: 39814 - protein, 11 aa, Artificial Sequence
  Peptide Derived from Human Papillomavirus
RDAVQVLKRKY

SEQ ID NO: 39815 - protein, 8 aa, Artificial Sequence
  Peptide Derived from Human Papillomavirus
RFLQGIPK

SEQ ID NO: 39816 - protein, 9 aa, Artificial Sequence
  Peptide Derived from Human Papillomavirus
RFLQGIPKK

SEQ ID NO: 39817 - protein, 10 aa, Artificial Sequence
  Peptide Derived from Human Papillomavirus
RLFESEDSGY

SEQ ID NO: 39818 - protein, 9 aa, Artificial Sequence
  Peptide Derived from Human Papillomavirus
RLKAICIEK

SEQ ID NO: 39819 - protein, 10 aa, Artificial Sequence
  Peptide Derived from Human Papillomavirus
RLSLHEDEDK

SEQ ID NO: 39820 - protein, 8 aa, Artificial Sequence
  Peptide Derived from Human Papillomavirus
RSTAAALY

SEQ ID NO: 39821 - protein, 10 aa, Artificial Sequence
  Peptide Derived from Human Papillomavirus
RSTAAALYWY

SEQ ID NO: 39822 - protein, 11 aa, Artificial Sequence
  Peptide Derived from Human Papillomavirus
RSTAAALYWYK

SEQ ID NO: 39823 - protein, 9 aa, Artificial Sequence
  Peptide Derived from Human Papillomavirus
RTWSRLSLH

SEQ ID NO: 39824 - protein, 9 aa, Artificial Sequence
  Peptide Derived from Human Papillomavirus
RVDDGGDWK

SEQ ID NO: 39825 - protein, 11 aa, Artificial Sequence
  Peptide Derived from Human Papillomavirus
SAFLKSNSQAK

SEQ ID NO: 39826 - protein, 9 aa, Artificial Sequence
  Peptide Derived from Human Papillomavirus
SFFSRTWSR

SEQ ID NO: 39827 - protein, 8 aa, Artificial Sequence
  Peptide Derived from Human Papillomavirus
SFLTALKR

SEQ ID NO: 39828 - protein, 10 aa, Artificial Sequence
  Peptide Derived from Human Papillomavirus
SFSELVRPFK

SEQ ID NO: 39829 - protein, 11 aa, Artificial Sequence
  Peptide Derived from Human Papillomavirus
SGCVDNNISPR

SEQ ID NO: 39830 - protein, 9 aa, Artificial Sequence
  Peptide Derived from Human Papillomavirus
SGGEGVSER

SEQ ID NO: 39831 - protein, 10 aa, Artificial Sequence
  Peptide Derived from Human Papillomavirus
SGGEGVSERH

SEQ ID NO: 39832 - protein, 8 aa, Artificial Sequence
  Peptide Derived from Human Papillomavirus
SGGGCSQY

SEQ ID NO: 39833 - protein, 11 aa, Artificial Sequence
  Peptide Derived from Human Papillomavirus
SGGSGGGCSQY

SEQ ID NO: 39834 - protein, 11 aa, Artificial Sequence
  Peptide Derived from Human Papillomavirus
SGSGGEGVSER

SEQ ID NO: 39835 - protein, 9 aa, Artificial Sequence
  Peptide Derived from Human Papillomavirus
SIKTLLQQY

SEQ ID NO: 39836 - protein, 9 aa, Artificial Sequence
  Peptide Derived from Human Papillomavirus
SLFGMSLMK

SEQ ID NO: 39837 - protein, 8 aa, Artificial Sequence
  Peptide Derived from Human Papillomavirus
SLHEDEDK

SEQ ID NO: 39838 - protein, 8 aa, Artificial Sequence
  Peptide Derived from Human Papillomavirus
SMSQWIKY

SEQ ID NO: 39839 - protein, 9 aa, Artificial Sequence
  Peptide Derived from Human Papillomavirus
SMSQWIKYR

SEQ ID NO: 39840 - protein, 10 aa, Artificial Sequence
  Peptide Derived from Human Papillomavirus
SNAKAAMLAK

SEQ ID NO: 39841 - protein, 8 aa, Artificial Sequence
  Peptide Derived from Human Papillomavirus
SNASAFLK

SEQ ID NO: 39842 - protein, 10 aa, Artificial Sequence
  Peptide Derived from Human Papillomavirus
SNINAGTDSR

SEQ ID NO: 39843 - protein, 9 aa, Artificial Sequence
  Peptide Derived from Human Papillomavirus
SNSQAKIVK

SEQ ID NO: 39844 - protein, 9 aa, Artificial Sequence
  Peptide Derived from Human Papillomavirus
STAAALYWY

SEQ ID NO: 39845 - protein, 10 aa, Artificial Sequence
  Peptide Derived from Human Papillomavirus
STAAALYWYK

SEQ ID NO: 39846 - protein, 9 aa, Artificial Sequence
  Peptide Derived from Human Papillomavirus
SVICFVNSK

SEQ ID NO: 39847 - protein, 11 aa, Artificial Sequence
  Peptide Derived from Human Papillomavirus
SVICFVNSKSH

SEQ ID NO: 39848 - protein, 8 aa, Artificial Sequence
  Peptide Derived from Human Papillomavirus
TAAALYWY

SEQ ID NO: 39849 - protein, 9 aa, Artificial Sequence
  Peptide Derived from Human Papillomavirus
TAAALYWYK

SEQ ID NO: 39850 - protein, 8 aa, Artificial Sequence
  Peptide Derived from Human Papillomavirus
TAQEAKQH

SEQ ID NO: 39851 - protein, 9 aa, Artificial Sequence
  Peptide Derived from Human Papillomavirus
TAQEAKQHR

SEQ ID NO: 39852 - protein, 9 aa, Artificial Sequence
  Peptide Derived from Human Papillomavirus
TDSRWPYLH

SEQ ID NO: 39853 - protein, 11 aa, Artificial Sequence
  Peptide Derived from Human Papillomavirus
TDSRWPYLHNR

SEQ ID NO: 39854 - protein, 8 aa, Artificial Sequence
  Peptide Derived from Human Papillomavirus
TGCNGWFY

SEQ ID NO: 39855 - protein, 10 aa, Artificial Sequence
  Peptide Derived from Human Papillomavirus
TGISNISEVY

SEQ ID NO: 39856 - protein, 8 aa, Artificial Sequence
  Peptide Derived from Human Papillomavirus
TIEKLLSK

SEQ ID NO: 39857 - protein, 9 aa, Artificial Sequence
  Peptide Derived from Human Papillomavirus
TLLQQYCLY

SEQ ID NO: 39858 - protein, 11 aa, Artificial Sequence
  Peptide Derived from Human Papillomavirus
TLLQQYCLYLH

SEQ ID NO: 39859 - protein, 8 aa, Artificial Sequence
  Peptide Derived from Human Papillomavirus
TMCRHYKR

SEQ ID NO: 39860 - protein, 11 aa, Artificial Sequence
  Peptide Derived from Human Papillomavirus
TMCRHYKRAEK

SEQ ID NO: 39861 - protein, 8 aa, Artificial Sequence
  Peptide Derived from Human Papillomavirus
TNILNVLK

SEQ ID NO: 39862 - protein, 10 aa, Artificial Sequence
  Peptide Derived from Human Papillomavirus
TNSNASAFLK

SEQ ID NO: 39863 - protein, 11 aa, Artificial Sequence
  Peptide Derived from Human Papillomavirus
TSNAKAAMLAK

SEQ ID NO: 39864 - protein, 11 aa, Artificial Sequence
  Peptide Derived from Human Papillomavirus
TSNINAGTDSR

SEQ ID NO: 39865 - protein, 8 aa, Artificial Sequence
  Peptide Derived from Human Papillomavirus
VDDGGDWK

SEQ ID NO: 39866 - protein, 8 aa, Artificial Sequence
  Peptide Derived from Human Papillomavirus
VDDSEIAY

SEQ ID NO: 39867 - protein, 9 aa, Artificial Sequence
  Peptide Derived from Human Papillomavirus
VDDSEIAYK

SEQ ID NO: 39868 - protein, 10 aa, Artificial Sequence
  Peptide Derived from Human Papillomavirus
VDDSEIAYKY

SEQ ID NO: 39869 - protein, 10 aa, Artificial Sequence
  Peptide Derived from Human Papillomavirus
VDFIVNDNDY

SEQ ID NO: 39870 - protein, 8 aa, Artificial Sequence
  Peptide Derived from Human Papillomavirus
VDNNISPR

SEQ ID NO: 39871 - protein, 10 aa, Artificial Sequence
  Peptide Derived from Human Papillomavirus
VDNNISPRLK

SEQ ID NO: 39872 - protein, 8 aa, Artificial Sequence
  Peptide Derived from Human Papillomavirus
VICFVNSK

SEQ ID NO: 39873 - protein, 10 aa, Artificial Sequence
  Peptide Derived from Human Papillomavirus
VICFVNSKSH

SEQ ID NO: 39874 - protein, 8 aa, Artificial Sequence
  Peptide Derived from Human Papillomavirus
VLKTSNAK

SEQ ID NO: 39875 - protein, 8 aa, Artificial Sequence
  Peptide Derived from Human Papillomavirus
VLLLVRYK

SEQ ID NO: 39876 - protein, 11 aa, Artificial Sequence
  Peptide Derived from Human Papillomavirus
VLLLVRYKCGK

SEQ ID NO: 39877 - protein, 8 aa, Artificial Sequence
  Peptide Derived from Human Papillomavirus
VSFSELVR

SEQ ID NO: 39878 - protein, 11 aa, Artificial Sequence
  Peptide Derived from Human Papillomavirus
VSFSELVRPFK

SEQ ID NO: 39879 - protein, 8 aa, Artificial Sequence
  Peptide Derived from Human Papillomavirus
VSMDVKHR

SEQ ID NO: 39880 - protein, 8 aa, Artificial Sequence
  Peptide Derived from Human Papillomavirus
VVLLLVRY

SEQ ID NO: 39881 - protein, 9 aa, Artificial Sequence
  Peptide Derived from Human Papillomavirus
VVLLLVRYK

SEQ ID NO: 39882 - protein, 10 aa, Artificial Sequence
  Peptide Derived from Human Papillomavirus
WFYVEAVVEK

SEQ ID NO: 39883 - protein, 11 aa, Artificial Sequence
  Peptide Derived from Human Papillomavirus
WFYVEAVVEKK

SEQ ID NO: 39884 - protein, 10 aa, Artificial Sequence
  Peptide Derived from Human Papillomavirus
WGMVVLLLVR

SEQ ID NO: 39885 - protein, 11 aa, Artificial Sequence
  Peptide Derived from Human Papillomavirus
WGMVVLLLVRY

SEQ ID NO: 39886 - protein, 8 aa, Artificial Sequence
  Peptide Derived from Human Papillomavirus
WIKYRCDR

SEQ ID NO: 39887 - protein, 10 aa, Artificial Sequence
  Peptide Derived from Human Papillomavirus
WIQRQTVLQH

SEQ ID NO: 39888 - protein, 9 aa, Artificial Sequence
  Peptide Derived from Human Papillomavirus
WLQPLADAK

SEQ ID NO: 39889 - protein, 9 aa, Artificial Sequence
  Peptide Derived from Human Papillomavirus
WNYIDDNLR

SEQ ID NO: 39890 - protein, 8 aa, Artificial Sequence
  Peptide Derived from Human Papillomavirus
YGAANTGK

SEQ ID NO: 39891 - protein, 10 aa, Artificial Sequence
  Peptide Derived from Human Papillomavirus
YGDTPEWIQR

SEQ ID NO: 39892 - protein, 10 aa, Artificial Sequence
  Peptide Derived from Human Papillomavirus
YGVSFSELVR

SEQ ID NO: 39893 - protein, 11 aa, Artificial Sequence
  Peptide Derived from Human Papillomavirus
YLTQAETETAH

SEQ ID NO: 39894 - protein, 8 aa, Artificial Sequence
  Peptide Derived from Human Papillomavirus
YVEAVVEK

SEQ ID NO: 39895 - protein, 9 aa, Artificial Sequence
  Peptide Derived from Human Papillomavirus
YVEAVVEKK

SEQ ID NO: 39896 - protein, 9 aa, Artificial Sequence
  Peptide Derived from Human Papillomavirus
AFNSSHKGR

SEQ ID NO: 39897 - protein, 8 aa, Artificial Sequence
  Peptide Derived from Human Papillomavirus
ANHPAATH

SEQ ID NO: 39898 - protein, 10 aa, Artificial Sequence
  Peptide Derived from Human Papillomavirus
ANHPAATHTK

SEQ ID NO: 39899 - protein, 8 aa, Artificial Sequence
  Peptide Derived from Human Papillomavirus
ANTLKCLR

SEQ ID NO: 39900 - protein, 9 aa, Artificial Sequence
  Peptide Derived from Human Papillomavirus
ANTLKCLRY

SEQ ID NO: 39901 - protein, 10 aa, Artificial Sequence
  Peptide Derived from Human Papillomavirus
ANTLKCLRYR

SEQ ID NO: 39902 - protein, 11 aa, Artificial Sequence
  Peptide Derived from Human Papillomavirus
AVSSTWHWTGH

SEQ ID NO: 39903 - protein, 8 aa, Artificial Sequence
  Peptide Derived from Human Papillomavirus
CAIYYKAR

SEQ ID NO: 39904 - protein, 8 aa, Artificial Sequence
  Peptide Derived from Human Papillomavirus
CLRYRFKK

SEQ ID NO: 39905 - protein, 9 aa, Artificial Sequence
  Peptide Derived from Human Papillomavirus
CLRYRFKKH

SEQ ID NO: 39906 - protein, 10 aa, Artificial Sequence
  Peptide Derived from Human Papillomavirus
CNSNTTPIVH

SEQ ID NO: 39907 - protein, 11 aa, Artificial Sequence
  Peptide Derived from Human Papillomavirus
CNTMHYTNWTH

SEQ ID NO: 39908 - protein, 9 aa, Artificial Sequence
  Peptide Derived from Human Papillomavirus
DAEKYSKNK

SEQ ID NO: 39909 - protein, 9 aa, Artificial Sequence
  Peptide Derived from Human Papillomavirus
DANTLKCLR

SEQ ID NO: 39910 - protein, 10 aa, Artificial Sequence
  Peptide Derived from Human Papillomavirus
DANTLKCLRY

SEQ ID NO: 39911 - protein, 11 aa, Artificial Sequence
  Peptide Derived from Human Papillomavirus
DANTLKCLRYR

SEQ ID NO: 39912 - protein, 8 aa, Artificial Sequence
  Peptide Derived from Human Papillomavirus
DDAEKYSK

SEQ ID NO: 39913 - protein, 10 aa, Artificial Sequence
  Peptide Derived from Human Papillomavirus
DDAEKYSKNK

SEQ ID NO: 39914 - protein, 9 aa, Artificial Sequence
  Peptide Derived from Human Papillomavirus
DGDICNTMH

SEQ ID NO: 39915 - protein, 10 aa, Artificial Sequence
  Peptide Derived from Human Papillomavirus
DGDICNTMHY

SEQ ID NO: 39916 - protein, 8 aa, Artificial Sequence
  Peptide Derived from Human Papillomavirus
DICNTMHY

SEQ ID NO: 39917 - protein, 8 aa, Artificial Sequence
  Peptide Derived from Human Papillomavirus
DLRDHIDY

SEQ ID NO: 39918 - protein, 10 aa, Artificial Sequence
  Peptide Derived from Human Papillomavirus
DLRDHIDYWK

SEQ ID NO: 39919 - protein, 11 aa, Artificial Sequence
  Peptide Derived from Human Papillomavirus
DLRDHIDYWKH

SEQ ID NO: 39920 - protein, 8 aa, Artificial Sequence
  Peptide Derived from Human Papillomavirus
DSTDLRDH

SEQ ID NO: 39921 - protein, 11 aa, Artificial Sequence
  Peptide Derived from Human Papillomavirus
DSTDLRDHIDY

SEQ ID NO: 39922 - protein, 10 aa, Artificial Sequence
  Peptide Derived from Human Papillomavirus
DTGNPCHTTK

SEQ ID NO: 39923 - protein, 9 aa, Artificial Sequence
  Peptide Derived from Human Papillomavirus
ECAIYYKAR

SEQ ID NO: 39924 - protein, 11 aa, Artificial Sequence
  Peptide Derived from Human Papillomavirus
EGIRTYFVQFK

SEQ ID NO: 39925 - protein, 10 aa, Artificial Sequence
  Peptide Derived from Human Papillomavirus
EGQVDYYGLY

SEQ ID NO: 39926 - protein, 11 aa, Artificial Sequence
  Peptide Derived from Human Papillomavirus
EGQVDYYGLYY

SEQ ID NO: 39927 - protein, 10 aa, Artificial Sequence
  Peptide Derived from Human Papillomavirus
EIIRQHLANH

SEQ ID NO: 39928 - protein, 10 aa, Artificial Sequence
  Peptide Derived from Human Papillomavirus
ELQLTLETIY

SEQ ID NO: 39929 - protein, 9 aa, Artificial Sequence
  Peptide Derived from Human Papillomavirus
EMGFKHINH

SEQ ID NO: 39930 - protein, 8 aa, Artificial Sequence
  Peptide Derived from Human Papillomavirus
ENDSTDLR

SEQ ID NO: 39931 - protein, 10 aa, Artificial Sequence
  Peptide Derived from Human Papillomavirus
ENDSTDLRDH

SEQ ID NO: 39932 - protein, 8 aa, Artificial Sequence
  Peptide Derived from Human Papillomavirus
ETIYNSQY

SEQ ID NO: 39933 - protein, 8 aa, Artificial Sequence
  Peptide Derived from Human Papillomavirus
ETQTTIQR

SEQ ID NO: 39934 - protein, 10 aa, Artificial Sequence
  Peptide Derived from Human Papillomavirus
ETQTTIQRPR

SEQ ID NO: 39935 - protein, 9 aa, Artificial Sequence
  Peptide Derived from Human Papillomavirus
EVSSPEIIR

SEQ ID NO: 39936 - protein, 11 aa, Artificial Sequence
  Peptide Derived from Human Papillomavirus
EVSSPEIIRQH

SEQ ID NO: 39937 - protein, 10 aa, Artificial Sequence
  Peptide Derived from Human Papillomavirus
FDGDICNTMH

SEQ ID NO: 39938 - protein, 11 aa, Artificial Sequence
  Peptide Derived from Human Papillomavirus
FDGDICNTMHY

SEQ ID NO: 39939 - protein, 9 aa, Artificial Sequence
  Peptide Derived from Human Papillomavirus
FLSQVKIPK

SEQ ID NO: 39940 - protein, 8 aa, Artificial Sequence
  Peptide Derived from Human Papillomavirus
FNSSHKGR

SEQ ID NO: 39941 - protein, 10 aa, Artificial Sequence
  Peptide Derived from Human Papillomavirus
FVQFKDDAEK

SEQ ID NO: 39942 - protein, 11 aa, Artificial Sequence
  Peptide Derived from Human Papillomavirus
FVQFKDDAEKY

SEQ ID NO: 39943 - protein, 8 aa, Artificial Sequence
  Peptide Derived from Human Papillomavirus
GCIKKHGY

SEQ ID NO: 39944 - protein, 10 aa, Artificial Sequence
  Peptide Derived from Human Papillomavirus
GDANTLKCLR

SEQ ID NO: 39945 - protein, 11 aa, Artificial Sequence
  Peptide Derived from Human Papillomavirus
GDANTLKCLRY

SEQ ID NO: 39946 - protein, 8 aa, Artificial Sequence
  Peptide Derived from Human Papillomavirus
GDICNTMH

SEQ ID NO: 39947 - protein, 9 aa, Artificial Sequence
  Peptide Derived from Human Papillomavirus
GDICNTMHY

SEQ ID NO: 39948 - protein, 10 aa, Artificial Sequence
  Peptide Derived from Human Papillomavirus
GIRTYFVQFK

SEQ ID NO: 39949 - protein, 10 aa, Artificial Sequence
  Peptide Derived from Human Papillomavirus
GLYYVHEGIR

SEQ ID NO: 39950 - protein, 8 aa, Artificial Sequence
  Peptide Derived from Human Papillomavirus
GNPCHTTK

SEQ ID NO: 39951 - protein, 11 aa, Artificial Sequence
  Peptide Derived from Human Papillomavirus
GNPCHTTKLLH

SEQ ID NO: 39952 - protein, 11 aa, Artificial Sequence
  Peptide Derived from Human Papillomavirus
GTEETQTTIQR

SEQ ID NO: 39953 - protein, 9 aa, Artificial Sequence
  Peptide Derived from Human Papillomavirus
HIDYWKHMR

SEQ ID NO: 39954 - protein, 10 aa, Artificial Sequence
  Peptide Derived from Human Papillomavirus
HLANHPAATH

SEQ ID NO: 39955 - protein, 10 aa, Artificial Sequence
  Peptide Derived from Human Papillomavirus
HLKGDANTLK

SEQ ID NO: 39956 - protein, 9 aa, Artificial Sequence
  Peptide Derived from Human Papillomavirus
HMRLECAIY

SEQ ID NO: 39957 - protein, 10 aa, Artificial Sequence
  Peptide Derived from Human Papillomavirus
HMRLECAIYY

SEQ ID NO: 39958 - protein, 11 aa, Artificial Sequence
  Peptide Derived from Human Papillomavirus
HMRLECAIYYK

SEQ ID NO: 39959 - protein, 8 aa, Artificial Sequence
  Peptide Derived from Human Papillomavirus
HTTKLLHR

SEQ ID NO: 39960 - protein, 8 aa, Artificial Sequence
  Peptide Derived from Human Papillomavirus
IDYWKHMR

SEQ ID NO: 39961 - protein, 9 aa, Artificial Sequence
  Peptide Derived from Human Papillomavirus
IIRQHLANH

SEQ ID NO: 39962 - protein, 9 aa, Artificial Sequence
  Peptide Derived from Human Papillomavirus
ILTAFNSSH

SEQ ID NO: 39963 - protein, 10 aa, Artificial Sequence
  Peptide Derived from Human Papillomavirus
ILTAFNSSHK

SEQ ID NO: 39964 - protein, 8 aa, Artificial Sequence
  Peptide Derived from Human Papillomavirus
KAREMGFK

SEQ ID NO: 39965 - protein, 9 aa, Artificial Sequence
  Peptide Derived from Human Papillomavirus
KAREMGFKH

SEQ ID NO: 39966 - protein, 8 aa, Artificial Sequence
  Peptide Derived from Human Papillomavirus
KCLRYRFK

SEQ ID NO: 39967 - protein, 9 aa, Artificial Sequence
  Peptide Derived from Human Papillomavirus
KCLRYRFKK

SEQ ID NO: 39968 - protein, 10 aa, Artificial Sequence
  Peptide Derived from Human Papillomavirus
KCLRYRFKKH

SEQ ID NO: 39969 - protein, 9 aa, Artificial Sequence
  Peptide Derived from Human Papillomavirus
KDDAEKYSK

SEQ ID NO: 39970 - protein, 11 aa, Artificial Sequence
  Peptide Derived from Human Papillomavirus
KDDAEKYSKNK

SEQ ID NO: 39971 - protein, 8 aa, Artificial Sequence
  Peptide Derived from Human Papillomavirus
KGDANTLK

SEQ ID NO: 39972 - protein, 11 aa, Artificial Sequence
  Peptide Derived from Human Papillomavirus
KGDANTLKCLR

SEQ ID NO: 39973 - protein, 8 aa, Artificial Sequence
  Peptide Derived from Human Papillomavirus
KNKVWEVH

SEQ ID NO: 39974 - protein, 9 aa, Artificial Sequence
  Peptide Derived from Human Papillomavirus
KSAIVTLTY

SEQ ID NO: 39975 - protein, 9 aa, Artificial Sequence
  Peptide Derived from Human Papillomavirus
LANHPAATH

SEQ ID NO: 39976 - protein, 11 aa, Artificial Sequence
  Peptide Derived from Human Papillomavirus
LANHPAATHTK

SEQ ID NO: 39977 - protein, 11 aa, Artificial Sequence
  Peptide Derived from Human Papillomavirus
LCQRLNVCQDK

SEQ ID NO: 39978 - protein, 11 aa, Artificial Sequence
  Peptide Derived from Human Papillomavirus
LNVCQDKILTH

SEQ ID NO: 39979 - protein, 8 aa, Artificial Sequence
  Peptide Derived from Human Papillomavirus
LSQVKIPK

SEQ ID NO: 39980 - protein, 8 aa, Artificial Sequence
  Peptide Derived from Human Papillomavirus
LTAFNSSH

SEQ ID NO: 39981 - protein, 9 aa, Artificial Sequence
  Peptide Derived from Human Papillomavirus
LTAFNSSHK

SEQ ID NO: 39982 - protein, 11 aa, Artificial Sequence
  Peptide Derived from Human Papillomavirus
LTAFNSSHKGR

SEQ ID NO: 39983 - protein, 9 aa, Artificial Sequence
  Peptide Derived from Human Papillomavirus
LTAPTGCIK

SEQ ID NO: 39984 - protein, 10 aa, Artificial Sequence
  Peptide Derived from Human Papillomavirus
LTAPTGCIKK

SEQ ID NO: 39985 - protein, 11 aa, Artificial Sequence
  Peptide Derived from Human Papillomavirus
LTAPTGCIKKH

SEQ ID NO: 39986 - protein, 11 aa, Artificial Sequence
  Peptide Derived from Human Papillomavirus
LTLETIYNSQY

SEQ ID NO: 39987 - protein, 9 aa, Artificial Sequence
  Peptide Derived from Human Papillomavirus
LTYDSEWQR

SEQ ID NO: 39988 - protein, 8 aa, Artificial Sequence
  Peptide Derived from Human Papillomavirus
MGFKHINH

SEQ ID NO: 39989 - protein, 11 aa, Artificial Sequence
  Peptide Derived from Human Papillomavirus
NCNSNTTPIVH

SEQ ID NO: 39990 - protein, 9 aa, Artificial Sequence
  Peptide Derived from Human Papillomavirus
NDSTDLRDH

SEQ ID NO: 39991 - protein, 9 aa, Artificial Sequence
  Peptide Derived from Human Papillomavirus
NSNTTPIVH

SEQ ID NO: 39992 - protein, 11 aa, Artificial Sequence
  Peptide Derived from Human Papillomavirus
NSNTTPIVHLK

SEQ ID NO: 39993 - protein, 8 aa, Artificial Sequence
  Peptide Derived from Human Papillomavirus
NSQYSNEK

SEQ ID NO: 39994 - protein, 8 aa, Artificial Sequence
  Peptide Derived from Human Papillomavirus
NTLKCLRY

SEQ ID NO: 39995 - protein, 9 aa, Artificial Sequence
  Peptide Derived from Human Papillomavirus
NTLKCLRYR

SEQ ID NO: 39996 - protein, 11 aa, Artificial Sequence
  Peptide Derived from Human Papillomavirus
NTLKCLRYRFK

SEQ ID NO: 39997 - protein, 10 aa, Artificial Sequence
  Peptide Derived from Human Papillomavirus
NTMHYTNWTH

SEQ ID NO: 39998 - protein, 9 aa, Artificial Sequence
  Peptide Derived from Human Papillomavirus
NTTPIVHLK

SEQ ID NO: 39999 - protein, 10 aa, Artificial Sequence
  Peptide Derived from Human Papillomavirus
NVCQDKILTH

SEQ ID NO: 40000 - protein, 11 aa, Artificial Sequence
  Peptide Derived from Human Papillomavirus
NVCQDKILTHY

SEQ ID NO: 40001 - protein, 9 aa, Artificial Sequence
  Peptide Derived from Human Papillomavirus
PCHTTKLLH

SEQ ID NO: 40002 - protein, 10 aa, Artificial Sequence
  Peptide Derived from Human Papillomavirus
PCHTTKLLHR

SEQ ID NO: 40003 - protein, 8 aa, Artificial Sequence
  Peptide Derived from Human Papillomavirus
PDTGNPCH

SEQ ID NO: 40004 - protein, 11 aa, Artificial Sequence
  Peptide Derived from Human Papillomavirus
PDTGNPCHTTK

SEQ ID NO: 40005 - protein, 10 aa, Artificial Sequence
  Peptide Derived from Human Papillomavirus
PILTAFNSSH

SEQ ID NO: 40006 - protein, 11 aa, Artificial Sequence
  Peptide Derived from Human Papillomavirus
PILTAFNSSHK

SEQ ID NO: 40007 - protein, 8 aa, Artificial Sequence
  Peptide Derived from Human Papillomavirus
PTGCIKKH

SEQ ID NO: 40008 - protein, 10 aa, Artificial Sequence
  Peptide Derived from Human Papillomavirus
PTGCIKKHGY

SEQ ID NO: 40009 - protein, 9 aa, Artificial Sequence
  Peptide Derived from Human Papillomavirus
PTLAVSKNK

SEQ ID NO: 40010 - protein, 8 aa, Artificial Sequence
  Peptide Derived from Human Papillomavirus
QDKILTHY

SEQ ID NO: 40011 - protein, 8 aa, Artificial Sequence
  Peptide Derived from Human Papillomavirus
QDVSLEVY

SEQ ID NO: 40012 - protein, 11 aa, Artificial Sequence
  Peptide Derived from Human Papillomavirus
QFDGDICNTMH

SEQ ID NO: 40013 - protein, 8 aa, Artificial Sequence
  Peptide Derived from Human Papillomavirus
QFKDDAEK

SEQ ID NO: 40014 - protein, 9 aa, Artificial Sequence
  Peptide Derived from Human Papillomavirus
QFKDDAEKY

SEQ ID NO: 40015 - protein, 11 aa, Artificial Sequence
  Peptide Derived from Human Papillomavirus
QFKDDAEKYSK

SEQ ID NO: 40016 - protein, 10 aa, Artificial Sequence
  Peptide Derived from Human Papillomavirus
QFLSQVKIPK

SEQ ID NO: 40017 - protein, 8 aa, Artificial Sequence
  Peptide Derived from Human Papillomavirus
QLTLETIY

SEQ ID NO: 40018 - protein, 8 aa, Artificial Sequence
  Peptide Derived from Human Papillomavirus
QTTIQRPR

SEQ ID NO: 40019 - protein, 8 aa, Artificial Sequence
  Peptide Derived from Human Papillomavirus
QVDYYGLY

SEQ ID NO: 40020 - protein, 9 aa, Artificial Sequence
  Peptide Derived from Human Papillomavirus
QVDYYGLYY

SEQ ID NO: 40021 - protein, 11 aa, Artificial Sequence
  Peptide Derived from Human Papillomavirus
QVDYYGLYYVH

SEQ ID NO: 40022 - protein, 10 aa, Artificial Sequence
  Peptide Derived from Human Papillomavirus
QVVPTLAVSK

SEQ ID NO: 40023 - protein, 8 aa, Artificial Sequence
  Peptide Derived from Human Papillomavirus
RDHIDYWK

SEQ ID NO: 40024 - protein, 9 aa, Artificial Sequence
  Peptide Derived from Human Papillomavirus
RDHIDYWKH

SEQ ID NO: 40025 - protein, 11 aa, Artificial Sequence
  Peptide Derived from Human Papillomavirus
RDHIDYWKHMR

SEQ ID NO: 40026 - protein, 9 aa, Artificial Sequence
  Peptide Derived from Human Papillomavirus
RDQFLSQVK

SEQ ID NO: 40027 - protein, 9 aa, Artificial Sequence
  Peptide Derived from Human Papillomavirus
RFKKHCTLY

SEQ ID NO: 40028 - protein, 8 aa, Artificial Sequence
  Peptide Derived from Human Papillomavirus
RLECAIYY

SEQ ID NO: 40029 - protein, 9 aa, Artificial Sequence
  Peptide Derived from Human Papillomavirus
RLECAIYYK

SEQ ID NO: 40030 - protein, 11 aa, Artificial Sequence
  Peptide Derived from Human Papillomavirus
RLECAIYYKAR

SEQ ID NO: 40031 - protein, 8 aa, Artificial Sequence
  Peptide Derived from Human Papillomavirus
RLNVCQDK

SEQ ID NO: 40032 - protein, 11 aa, Artificial Sequence
  Peptide Derived from Human Papillomavirus
RSEPDTGNPCH

SEQ ID NO: 40033 - protein, 8 aa, Artificial Sequence
  Peptide Derived from Human Papillomavirus
RTYFVQFK

SEQ ID NO: 40034 - protein, 8 aa, Artificial Sequence
  Peptide Derived from Human Papillomavirus
SAIVTLTY

SEQ ID NO: 40035 - protein, 11 aa, Artificial Sequence
  Peptide Derived from Human Papillomavirus
SNEVSSPEIIR

SEQ ID NO: 40036 - protein, 8 aa, Artificial Sequence
  Peptide Derived from Human Papillomavirus
SNTTPIVH

SEQ ID NO: 40037 - protein, 10 aa, Artificial Sequence
  Peptide Derived from Human Papillomavirus
SNTTPIVHLK

SEQ ID NO: 40038 - protein, 9 aa, Artificial Sequence
  Peptide Derived from Human Papillomavirus
SSPEIIRQH

SEQ ID NO: 40039 - protein, 9 aa, Artificial Sequence
  Peptide Derived from Human Papillomavirus
SSTWHWTGH

SEQ ID NO: 40040 - protein, 10 aa, Artificial Sequence
  Peptide Derived from Human Papillomavirus
STDLRDHIDY

SEQ ID NO: 40041 - protein, 8 aa, Artificial Sequence
  Peptide Derived from Human Papillomavirus
STWHWTGH

SEQ ID NO: 40042 - protein, 11 aa, Artificial Sequence
  Peptide Derived from Human Papillomavirus
STWHWTGHNVK

SEQ ID NO: 40043 - protein, 11 aa, Artificial Sequence
  Peptide Derived from Human Papillomavirus
SVTVVEGQVDY

SEQ ID NO: 40044 - protein, 8 aa, Artificial Sequence
  Peptide Derived from Human Papillomavirus
TAFNSSHK

SEQ ID NO: 40045 - protein, 10 aa, Artificial Sequence
  Peptide Derived from Human Papillomavirus
TAFNSSHKGR

SEQ ID NO: 40046 - protein, 8 aa, Artificial Sequence
  Peptide Derived from Human Papillomavirus
TAPTGCIK

SEQ ID NO: 40047 - protein, 9 aa, Artificial Sequence
  Peptide Derived from Human Papillomavirus
TAPTGCIKK

SEQ ID NO: 40048 - protein, 10 aa, Artificial Sequence
  Peptide Derived from Human Papillomavirus
TAPTGCIKKH

SEQ ID NO: 40049 - protein, 8 aa, Artificial Sequence
  Peptide Derived from Human Papillomavirus
TAVSSTWH

SEQ ID NO: 40050 - protein, 9 aa, Artificial Sequence
  Peptide Derived from Human Papillomavirus
TDLRDHIDY

SEQ ID NO: 40051 - protein, 11 aa, Artificial Sequence
  Peptide Derived from Human Papillomavirus
TDLRDHIDYWK

SEQ ID NO: 40052 - protein, 9 aa, Artificial Sequence
  Peptide Derived from Human Papillomavirus
TGCIKKHGY

SEQ ID NO: 40053 - protein, 8 aa, Artificial Sequence
  Peptide Derived from Human Papillomavirus
TGHNVKHK

SEQ ID NO: 40054 - protein, 9 aa, Artificial Sequence
  Peptide Derived from Human Papillomavirus
TGNPCHTTK

SEQ ID NO: 40055 - protein, 11 aa, Artificial Sequence
  Peptide Derived from Human Papillomavirus
TIYNSQYSNEK

SEQ ID NO: 40056 - protein, 8 aa, Artificial Sequence
  Peptide Derived from Human Papillomavirus
TLAVSKNK

SEQ ID NO: 40057 - protein, 10 aa, Artificial Sequence
  Peptide Derived from Human Papillomavirus
TLETIYNSQY

SEQ ID NO: 40058 - protein, 8 aa, Artificial Sequence
  Peptide Derived from Human Papillomavirus
TLKCLRYR

SEQ ID NO: 40059 - protein, 10 aa, Artificial Sequence
  Peptide Derived from Human Papillomavirus
TLKCLRYRFK

SEQ ID NO: 40060 - protein, 11 aa, Artificial Sequence
  Peptide Derived from Human Papillomavirus
TLKCLRYRFKK

SEQ ID NO: 40061 - protein, 10 aa, Artificial Sequence
  Peptide Derived from Human Papillomavirus
TLQDVSLEVY

SEQ ID NO: 40062 - protein, 10 aa, Artificial Sequence
  Peptide Derived from Human Papillomavirus
TLTYDSEWQR

SEQ ID NO: 40063 - protein, 11 aa, Artificial Sequence
  Peptide Derived from Human Papillomavirus
TLYTAVSSTWH

SEQ ID NO: 40064 - protein, 9 aa, Artificial Sequence
  Peptide Derived from Human Papillomavirus
TMHYTNWTH

SEQ ID NO: 40065 - protein, 11 aa, Artificial Sequence
  Peptide Derived from Human Papillomavirus
TMHYTNWTHIY

SEQ ID NO: 40066 - protein, 8 aa, Artificial Sequence
  Peptide Derived from Human Papillomavirus
TTPIVHLK

SEQ ID NO: 40067 - protein, 9 aa, Artificial Sequence
  Peptide Derived from Human Papillomavirus
TVVEGQVDY

SEQ ID NO: 40068 - protein, 10 aa, Artificial Sequence
  Peptide Derived from Human Papillomavirus
TVVEGQVDYY

SEQ ID NO: 40069 - protein, 9 aa, Artificial Sequence
  Peptide Derived from Human Papillomavirus
VCQDKILTH

SEQ ID NO: 40070 - protein, 10 aa, Artificial Sequence
  Peptide Derived from Human Papillomavirus
VCQDKILTHY

SEQ ID NO: 40071 - protein, 8 aa, Artificial Sequence
  Peptide Derived from Human Papillomavirus
VDYYGLYY

SEQ ID NO: 40072 - protein, 10 aa, Artificial Sequence
  Peptide Derived from Human Papillomavirus
VDYYGLYYVH

SEQ ID NO: 40073 - protein, 8 aa, Artificial Sequence
  Peptide Derived from Human Papillomavirus
VSSPEIIR

SEQ ID NO: 40074 - protein, 10 aa, Artificial Sequence
  Peptide Derived from Human Papillomavirus
VSSPEIIRQH

SEQ ID NO: 40075 - protein, 10 aa, Artificial Sequence
  Peptide Derived from Human Papillomavirus
VSSTWHWTGH

SEQ ID NO: 40076 - protein, 11 aa, Artificial Sequence
  Peptide Derived from Human Papillomavirus
VTLTYDSEWQR

SEQ ID NO: 40077 - protein, 10 aa, Artificial Sequence
  Peptide Derived from Human Papillomavirus
VTVVEGQVDY

SEQ ID NO: 40078 - protein, 11 aa, Artificial Sequence
  Peptide Derived from Human Papillomavirus
VTVVEGQVDYY

SEQ ID NO: 40079 - protein, 8 aa, Artificial Sequence
  Peptide Derived from Human Papillomavirus
VVEGQVDY

SEQ ID NO: 40080 - protein, 9 aa, Artificial Sequence
  Peptide Derived from Human Papillomavirus
VVEGQVDYY

SEQ ID NO: 40081 - protein, 9 aa, Artificial Sequence
  Peptide Derived from Human Papillomavirus
VVPTLAVSK

SEQ ID NO: 40082 - protein, 11 aa, Artificial Sequence
  Peptide Derived from Human Papillomavirus
VVPTLAVSKNK

SEQ ID NO: 40083 - protein, 8 aa, Artificial Sequence
  Peptide Derived from Human Papillomavirus
WTGHNVKH

SEQ ID NO: 40084 - protein, 9 aa, Artificial Sequence
  Peptide Derived from Human Papillomavirus
WTGHNVKHK

SEQ ID NO: 40085 - protein, 11 aa, Artificial Sequence
  Peptide Derived from Human Papillomavirus
WTLQDVSLEVY

SEQ ID NO: 40086 - protein, 11 aa, Artificial Sequence
  Peptide Derived from Human Papillomavirus
YFVQFKDDAEK

SEQ ID NO: 40087 - protein, 11 aa, Artificial Sequence
  Peptide Derived from Human Papillomavirus
YGLYYVHEGIR

SEQ ID NO: 40088 - protein, 10 aa, Artificial Sequence
  Peptide Derived from Human Papillomavirus
YLTAPTGCIK

SEQ ID NO: 40089 - protein, 11 aa, Artificial Sequence
  Peptide Derived from Human Papillomavirus
YLTAPTGCIKK

SEQ ID NO: 40090 - protein, 9 aa, Artificial Sequence
  Peptide Derived from Human Papillomavirus
YNSQYSNEK

SEQ ID NO: 40091 - protein, 10 aa, Artificial Sequence
  Peptide Derived from Human Papillomavirus
YSKNKVWEVH

SEQ ID NO: 40092 - protein, 9 aa, Artificial Sequence
  Peptide Derived from Human Papillomavirus
YTAVSSTWH

SEQ ID NO: 40093 - protein, 8 aa, Artificial Sequence
  Peptide Derived from Human Papillomavirus
YTNWTHIY

SEQ ID NO: 40094 - protein, 9 aa, Artificial Sequence
  Peptide Derived from Human Papillomavirus
YVHEGIRTY

SEQ ID NO: 40095 - protein, 11 aa, Artificial Sequence
  Peptide Derived from Human Papillomavirus
AASAFRCFIVY

SEQ ID NO: 40096 - protein, 8 aa, Artificial Sequence
  Peptide Derived from Human Papillomavirus
AFRCFIVY

SEQ ID NO: 40097 - protein, 10 aa, Artificial Sequence
  Peptide Derived from Human Papillomavirus
ASAFRCFIVY

SEQ ID NO: 40098 - protein, 10 aa, Artificial Sequence
  Peptide Derived from Human Papillomavirus
CFIVYIIFVY

SEQ ID NO: 40099 - protein, 11 aa, Artificial Sequence
  Peptide Derived from Human Papillomavirus
CVLLCVCLLIR

SEQ ID NO: 40100 - protein, 9 aa, Artificial Sequence
  Peptide Derived from Human Papillomavirus
FIVYIIFVY

SEQ ID NO: 40101 - protein, 8 aa, Artificial Sequence
  Peptide Derived from Human Papillomavirus
FLIHTHAR

SEQ ID NO: 40102 - protein, 10 aa, Artificial Sequence
  Peptide Derived from Human Papillomavirus
FVYIPLFLIH

SEQ ID NO: 40103 - protein, 11 aa, Artificial Sequence
  Peptide Derived from Human Papillomavirus
IFVYIPLFLIH

SEQ ID NO: 40104 - protein, 8 aa, Artificial Sequence
  Peptide Derived from Human Papillomavirus
ITAASAFR

SEQ ID NO: 40105 - protein, 8 aa, Artificial Sequence
  Peptide Derived from Human Papillomavirus
IVYIIFVY

SEQ ID NO: 40106 - protein, 8 aa, Artificial Sequence
  Peptide Derived from Human Papillomavirus
LCVCLLIR

SEQ ID NO: 40107 - protein, 9 aa, Artificial Sequence
  Peptide Derived from Human Papillomavirus
LFLIHTHAR

SEQ ID NO: 40108 - protein, 9 aa, Artificial Sequence
  Peptide Derived from Human Papillomavirus
LLCVCLLIR

SEQ ID NO: 40109 - protein, 8 aa, Artificial Sequence
  Peptide Derived from Human Papillomavirus
LLLSVSTY

SEQ ID NO: 40110 - protein, 11 aa, Artificial Sequence
  Peptide Derived from Human Papillomavirus
LLWITAASAFR

SEQ ID NO: 40111 - protein, 8 aa, Artificial Sequence
  Peptide Derived from Human Papillomavirus
PLFLIHTH

SEQ ID NO: 40112 - protein, 10 aa, Artificial Sequence
  Peptide Derived from Human Papillomavirus
PLFLIHTHAR

SEQ ID NO: 40113 - protein, 9 aa, Artificial Sequence
  Peptide Derived from Human Papillomavirus
PLLLSVSTY

SEQ ID NO: 40114 - protein, 11 aa, Artificial Sequence
  Peptide Derived from Human Papillomavirus
RCFIVYIIFVY

SEQ ID NO: 40115 - protein, 9 aa, Artificial Sequence
  Peptide Derived from Human Papillomavirus
SAFRCFIVY

SEQ ID NO: 40116 - protein, 10 aa, Artificial Sequence
  Peptide Derived from Human Papillomavirus
VLLCVCLLIR

SEQ ID NO: 40117 - protein, 9 aa, Artificial Sequence
  Peptide Derived from Human Papillomavirus
WITAASAFR

SEQ ID NO: 40118 - protein, 8 aa, Artificial Sequence
  Peptide Derived from Human Papillomavirus
YIPLFLIH

SEQ ID NO: 40119 - protein, 10 aa, Artificial Sequence
  Peptide Derived from Human Papillomavirus
YIPLFLIHTH

SEQ ID NO: 40120 - protein, 9 aa, Artificial Sequence
  Peptide Derived from Human Papillomavirus
AFRDLCIVY

SEQ ID NO: 40121 - protein, 10 aa, Artificial Sequence
  Peptide Derived from Human Papillomavirus
AFRDLCIVYR

SEQ ID NO: 40122 - protein, 9 aa, Artificial Sequence
  Peptide Derived from Human Papillomavirus
AMFQDPQER

SEQ ID NO: 40123 - protein, 11 aa, Artificial Sequence
  Peptide Derived from Human Papillomavirus
AMFQDPQERPR

SEQ ID NO: 40124 - protein, 8 aa, Artificial Sequence
  Peptide Derived from Human Papillomavirus
AVCDKCLK

SEQ ID NO: 40125 - protein, 10 aa, Artificial Sequence
  Peptide Derived from Human Papillomavirus
AVCDKCLKFY

SEQ ID NO: 40126 - protein, 8 aa, Artificial Sequence
  Peptide Derived from Human Papillomavirus
CCRSSRTR

SEQ ID NO: 40127 - protein, 9 aa, Artificial Sequence
  Peptide Derived from Human Papillomavirus
CCRSSRTRR

SEQ ID NO: 40128 - protein, 8 aa, Artificial Sequence
  Peptide Derived from Human Papillomavirus
CDKCLKFY

SEQ ID NO: 40129 - protein, 10 aa, Artificial Sequence
  Peptide Derived from Human Papillomavirus
CDKCLKFYSK

SEQ ID NO: 40130 - protein, 10 aa, Artificial Sequence
  Peptide Derived from Human Papillomavirus
CIVYRDGNPY

SEQ ID NO: 40131 - protein, 11 aa, Artificial Sequence
  Peptide Derived from Human Papillomavirus
CLKFYSKISEY

SEQ ID NO: 40132 - protein, 9 aa, Artificial Sequence
  Peptide Derived from Human Papillomavirus
CMSCCRSSR

SEQ ID NO: 40133 - protein, 11 aa, Artificial Sequence
  Peptide Derived from Human Papillomavirus
CMSCCRSSRTR

SEQ ID NO: 40134 - protein, 9 aa, Artificial Sequence
  Peptide Derived from Human Papillomavirus
CTELQTTIH

SEQ ID NO: 40135 - protein, 10 aa, Artificial Sequence
  Peptide Derived from Human Papillomavirus
CVYCKQQLLR

SEQ ID NO: 40136 - protein, 11 aa, Artificial Sequence
  Peptide Derived from Human Papillomavirus
CVYCKQQLLRR

SEQ ID NO: 40137 - protein, 11 aa, Artificial Sequence
  Peptide Derived from Human Papillomavirus
DFAFRDLCIVY

SEQ ID NO: 40138 - protein, 10 aa, Artificial Sequence
  Peptide Derived from Human Papillomavirus
DGNPYAVCDK

SEQ ID NO: 40139 - protein, 8 aa, Artificial Sequence
  Peptide Derived from Human Papillomavirus
DIILECVY

SEQ ID NO: 40140 - protein, 10 aa, Artificial Sequence
  Peptide Derived from Human Papillomavirus
DIILECVYCK

SEQ ID NO: 40141 - protein, 11 aa, Artificial Sequence
  Peptide Derived from Human Papillomavirus
DLLIRCINCQK

SEQ ID NO: 40142 - protein, 11 aa, Artificial Sequence
  Peptide Derived from Human Papillomavirus
ECVYCKQQLLR

SEQ ID NO: 40143 - protein, 8 aa, Artificial Sequence
  Peptide Derived from Human Papillomavirus
EVYDFAFR

SEQ ID NO: 40144 - protein, 10 aa, Artificial Sequence
  Peptide Derived from Human Papillomavirus
FAFRDLCIVY

SEQ ID NO: 40145 - protein, 11 aa, Artificial Sequence
  Peptide Derived from Human Papillomavirus
FAFRDLCIVYR

SEQ ID NO: 40146 - protein, 9 aa, Artificial Sequence
  Peptide Derived from Human Papillomavirus
GNPYAVCDK

SEQ ID NO: 40147 - protein, 8 aa, Artificial Sequence
  Peptide Derived from Human Papillomavirus
GTTLEQQY

SEQ ID NO: 40148 - protein, 10 aa, Artificial Sequence
  Peptide Derived from Human Papillomavirus
GTTLEQQYNK

SEQ ID NO: 40149 - protein, 9 aa, Artificial Sequence
  Peptide Derived from Human Papillomavirus
HDIILECVY

SEQ ID NO: 40150 - protein, 11 aa, Artificial Sequence
  Peptide Derived from Human Papillomavirus
HDIILECVYCK

SEQ ID NO: 40151 - protein, 9 aa, Artificial Sequence
  Peptide Derived from Human Papillomavirus
HLDKKQRFH

SEQ ID NO: 40152 - protein, 10 aa, Artificial Sequence
  Peptide Derived from Human Papillomavirus
HNIRGRWTGR

SEQ ID NO: 40153 - protein, 9 aa, Artificial Sequence
  Peptide Derived from Human Papillomavirus
IILECVYCK

SEQ ID NO: 40154 - protein, 8 aa, Artificial Sequence
  Peptide Derived from Human Papillomavirus
ILECVYCK

SEQ ID NO: 40155 - protein, 9 aa, Artificial Sequence
  Peptide Derived from Human Papillomavirus
ISEYRHYCY

SEQ ID NO: 40156 - protein, 9 aa, Artificial Sequence
  Peptide Derived from Human Papillomavirus
IVYRDGNPY

SEQ ID NO: 40157 - protein, 8 aa, Artificial Sequence
  Peptide Derived from Human Papillomavirus
KCLKFYSK

SEQ ID NO: 40158 - protein, 9 aa, Artificial Sequence
  Peptide Derived from Human Papillomavirus
KFYSKISEY

SEQ ID NO: 40159 - protein, 10 aa, Artificial Sequence
  Peptide Derived from Human Papillomavirus
KFYSKISEYR

SEQ ID NO: 40160 - protein, 11 aa, Artificial Sequence
  Peptide Derived from Human Papillomavirus
KFYSKISEYRH

SEQ ID NO: 40161 - protein, 8 aa, Artificial Sequence
  Peptide Derived from Human Papillomavirus
KISEYRHY

SEQ ID NO: 40162 - protein, 10 aa, Artificial Sequence
  Peptide Derived from Human Papillomavirus
KISEYRHYCY

SEQ ID NO: 40163 - protein, 11 aa, Artificial Sequence
  Peptide Derived from Human Papillomavirus
LCIVYRDGNPY

SEQ ID NO: 40164 - protein, 8 aa, Artificial Sequence
  Peptide Derived from Human Papillomavirus
LCPEEKQR

SEQ ID NO: 40165 - protein, 9 aa, Artificial Sequence
  Peptide Derived from Human Papillomavirus
LCPEEKQRH

SEQ ID NO: 40166 - protein, 10 aa, Artificial Sequence
  Peptide Derived from Human Papillomavirus
LCTELQTTIH

SEQ ID NO: 40167 - protein, 8 aa, Artificial Sequence
  Peptide Derived from Human Papillomavirus
LDKKQRFH

SEQ ID NO: 40168 - protein, 11 aa, Artificial Sequence
  Peptide Derived from Human Papillomavirus
LDKKQRFHNIR

SEQ ID NO: 40169 - protein, 9 aa, Artificial Sequence
  Peptide Derived from Human Papillomavirus
LIRCINCQK

SEQ ID NO: 40170 - protein, 10 aa, Artificial Sequence
  Peptide Derived from Human Papillomavirus
LLIRCINCQK

SEQ ID NO: 40171 - protein, 8 aa, Artificial Sequence
  Peptide Derived from Human Papillomavirus
MFQDPQER

SEQ ID NO: 40172 - protein, 10 aa, Artificial Sequence
  Peptide Derived from Human Papillomavirus
MFQDPQERPR

SEQ ID NO: 40173 - protein, 11 aa, Artificial Sequence
  Peptide Derived from Human Papillomavirus
MFQDPQERPRK

SEQ ID NO: 40174 - protein, 8 aa, Artificial Sequence
  Peptide Derived from Human Papillomavirus
MSCCRSSR

SEQ ID NO: 40175 - protein, 10 aa, Artificial Sequence
  Peptide Derived from Human Papillomavirus
MSCCRSSRTR

SEQ ID NO: 40176 - protein, 11 aa, Artificial Sequence
  Peptide Derived from Human Papillomavirus
MSCCRSSRTRR

SEQ ID NO: 40177 - protein, 11 aa, Artificial Sequence
  Peptide Derived from Human Papillomavirus
NCQKPLCPEEK

SEQ ID NO: 40178 - protein, 9 aa, Artificial Sequence
  Peptide Derived from Human Papillomavirus
NIRGRWTGR

SEQ ID NO: 40179 - protein, 8 aa, Artificial Sequence
  Peptide Derived from Human Papillomavirus
PLCDLLIR

SEQ ID NO: 40180 - protein, 9 aa, Artificial Sequence
  Peptide Derived from Human Papillomavirus
PLCPEEKQR

SEQ ID NO: 40181 - protein, 10 aa, Artificial Sequence
  Peptide Derived from Human Papillomavirus
PLCPEEKQRH

SEQ ID NO: 40182 - protein, 8 aa, Artificial Sequence
  Peptide Derived from Human Papillomavirus
QDPQERPR

SEQ ID NO: 40183 - protein, 9 aa, Artificial Sequence
  Peptide Derived from Human Papillomavirus
QDPQERPRK

SEQ ID NO: 40184 - protein, 11 aa, Artificial Sequence
  Peptide Derived from Human Papillomavirus
QLCTELQTTIH

SEQ ID NO: 40185 - protein, 8 aa, Artificial Sequence
  Peptide Derived from Human Papillomavirus
QLLRREVY

SEQ ID NO: 40186 - protein, 10 aa, Artificial Sequence
  Peptide Derived from Human Papillomavirus
RCMSCCRSSR

SEQ ID NO: 40187 - protein, 11 aa, Artificial Sequence
  Peptide Derived from Human Papillomavirus
RDGNPYAVCDK

SEQ ID NO: 40188 - protein, 8 aa, Artificial Sequence
  Peptide Derived from Human Papillomavirus
RDLCIVYR

SEQ ID NO: 40189 - protein, 8 aa, Artificial Sequence
  Peptide Derived from Human Papillomavirus
RFHNIRGR

SEQ ID NO: 40190 - protein, 11 aa, Artificial Sequence
  Peptide Derived from Human Papillomavirus
RTAMFQDPQER

SEQ ID NO: 40191 - protein, 9 aa, Artificial Sequence
  Peptide Derived from Human Papillomavirus
SCCRSSRTR

SEQ ID NO: 40192 - protein, 10 aa, Artificial Sequence
  Peptide Derived from Human Papillomavirus
SCCRSSRTRR

SEQ ID NO: 40193 - protein, 11 aa, Artificial Sequence
  Peptide Derived from Human Papillomavirus
SLYGTTLEQQY

SEQ ID NO: 40194 - protein, 10 aa, Artificial Sequence
  Peptide Derived from Human Papillomavirus
TAMFQDPQER

SEQ ID NO: 40195 - protein, 9 aa, Artificial Sequence
  Peptide Derived from Human Papillomavirus
TGRCMSCCR

SEQ ID NO: 40196 - protein, 11 aa, Artificial Sequence
  Peptide Derived from Human Papillomavirus
TIHDIILECVY

SEQ ID NO: 40197 - protein, 8 aa, Artificial Sequence
  Peptide Derived from Human Papillomavirus
TLEQQYNK

SEQ ID NO: 40198 - protein, 9 aa, Artificial Sequence
  Peptide Derived from Human Papillomavirus
TTLEQQYNK

SEQ ID NO: 40199 - protein, 9 aa, Artificial Sequence
  Peptide Derived from Human Papillomavirus
VCDKCLKFY

SEQ ID NO: 40200 - protein, 11 aa, Artificial Sequence
  Peptide Derived from Human Papillomavirus
VCDKCLKFYSK

SEQ ID NO: 40201 - protein, 10 aa, Artificial Sequence
  Peptide Derived from Human Papillomavirus
WTGRCMSCCR

SEQ ID NO: 40202 - protein, 9 aa, Artificial Sequence
  Peptide Derived from Human Papillomavirus
YAVCDKCLK

SEQ ID NO: 40203 - protein, 11 aa, Artificial Sequence
  Peptide Derived from Human Papillomavirus
YAVCDKCLKFY

SEQ ID NO: 40204 - protein, 8 aa, Artificial Sequence
  Peptide Derived from Human Papillomavirus
YCKQQLLR

SEQ ID NO: 40205 - protein, 9 aa, Artificial Sequence
  Peptide Derived from Human Papillomavirus
YCKQQLLRR

SEQ ID NO: 40206 - protein, 9 aa, Artificial Sequence
  Peptide Derived from Human Papillomavirus
YGTTLEQQY

SEQ ID NO: 40207 - protein, 11 aa, Artificial Sequence
  Peptide Derived from Human Papillomavirus
YGTTLEQQYNK

SEQ ID NO: 40208 - protein, 11 aa, Artificial Sequence
  Peptide Derived from Human Papillomavirus
YNKPLCDLLIR

SEQ ID NO: 40209 - protein, 8 aa, Artificial Sequence
  Peptide Derived from Human Papillomavirus
YSKISEYR

SEQ ID NO: 40210 - protein, 9 aa, Artificial Sequence
  Peptide Derived from Human Papillomavirus
YSKISEYRH

SEQ ID NO: 40211 - protein, 10 aa, Artificial Sequence
  Peptide Derived from Human Papillomavirus
YSKISEYRHY

SEQ ID NO: 40212 - protein, 8 aa, Artificial Sequence
  Peptide Derived from Human Papillomavirus
AGQAEPDR

SEQ ID NO: 40213 - protein, 10 aa, Artificial Sequence
  Peptide Derived from Human Papillomavirus
AGQAEPDRAH

SEQ ID NO: 40214 - protein, 11 aa, Artificial Sequence
  Peptide Derived from Human Papillomavirus
AGQAEPDRAHY

SEQ ID NO: 40215 - protein, 9 aa, Artificial Sequence
  Peptide Derived from Human Papillomavirus
CCKCDSTLR

SEQ ID NO: 40216 - protein, 10 aa, Artificial Sequence
  Peptide Derived from Human Papillomavirus
CVQSTHVDIR

SEQ ID NO: 40217 - protein, 11 aa, Artificial Sequence
  Peptide Derived from Human Papillomavirus
DGPAGQAEPDR

SEQ ID NO: 40218 - protein, 10 aa, Artificial Sequence
  Peptide Derived from Human Papillomavirus
DLQPETTDLY

SEQ ID NO: 40219 - protein, 8 aa, Artificial Sequence
  Peptide Derived from Human Papillomavirus
DTPTLHEY

SEQ ID NO: 40220 - protein, 8 aa, Artificial Sequence
  Peptide Derived from Human Papillomavirus
ETTDLYCY

SEQ ID NO: 40221 - protein, 10 aa, Artificial Sequence
  Peptide Derived from Human Papillomavirus
FCCKCDSTLR

SEQ ID NO: 40222 - protein, 9 aa, Artificial Sequence
  Peptide Derived from Human Papillomavirus
GDTPTLHEY

SEQ ID NO: 40223 - protein, 10 aa, Artificial Sequence
  Peptide Derived from Human Papillomavirus
GIVCPICSQK

SEQ ID NO: 40224 - protein, 8 aa, Artificial Sequence
  Peptide Derived from Human Papillomavirus
HGDTPTLH

SEQ ID NO: 40225 - protein, 10 aa, Artificial Sequence
  Peptide Derived from Human Papillomavirus
HGDTPTLHEY

SEQ ID NO: 40226 - protein, 9 aa, Artificial Sequence
  Peptide Derived from Human Papillomavirus
IVCPICSQK

SEQ ID NO: 40227 - protein, 11 aa, Artificial Sequence
  Peptide Derived from Human Papillomavirus
LCVQSTHVDIR

SEQ ID NO: 40228 - protein, 11 aa, Artificial Sequence
  Peptide Derived from Human Papillomavirus
LDLQPETTDLY

SEQ ID NO: 40229 - protein, 11 aa, Artificial Sequence
  Peptide Derived from Human Papillomavirus
LGIVCPICSQK

SEQ ID NO: 40230 - protein, 8 aa, Artificial Sequence
  Peptide Derived from Human Papillomavirus
NIVTFCCK

SEQ ID NO: 40231 - protein, 9 aa, Artificial Sequence
  Peptide Derived from Human Papillomavirus
PAGQAEPDR

SEQ ID NO: 40232 - protein, 11 aa, Artificial Sequence
  Peptide Derived from Human Papillomavirus
PAGQAEPDRAH

SEQ ID NO: 40233 - protein, 8 aa, Artificial Sequence
  Peptide Derived from Human Papillomavirus
QAEPDRAH

SEQ ID NO: 40234 - protein, 9 aa, Artificial Sequence
  Peptide Derived from Human Papillomavirus
QAEPDRAHY

SEQ ID NO: 40235 - protein, 8 aa, Artificial Sequence
  Peptide Derived from Human Papillomavirus
QSTHVDIR

SEQ ID NO: 40236 - protein, 8 aa, Artificial Sequence
  Peptide Derived from Human Papillomavirus
RLCVQSTH

SEQ ID NO: 40237 - protein, 11 aa, Artificial Sequence
  Peptide Derived from Human Papillomavirus
STLRLCVQSTH

SEQ ID NO: 40238 - protein, 11 aa, Artificial Sequence
  Peptide Derived from Human Papillomavirus
TFCCKCDSTLR

SEQ ID NO: 40239 - protein, 10 aa, Artificial Sequence
  Peptide Derived from Human Papillomavirus
TLRLCVQSTH

SEQ ID NO: 40240 - protein, 8 aa, Artificial Sequence
  Peptide Derived from Human Papillomavirus
VCPICSQK

SEQ ID NO: 40241 - protein, 9 aa, Artificial Sequence
  Peptide Derived from Human Papillomavirus
YNIVTFCCK

SEQ ID NO: 40242 - protein, 10 aa, Artificial Sequence
  Peptide Derived from Human Papillomavirus
AAISTSETTY

SEQ ID NO: 40243 - protein, 11 aa, Artificial Sequence
  Peptide Derived from Human Papillomavirus
AAISTSETTYK

SEQ ID NO: 40244 - protein, 9 aa, Artificial Sequence
  Peptide Derived from Human Papillomavirus
AANAGVDNR

SEQ ID NO: 40245 - protein, 11 aa, Artificial Sequence
  Peptide Derived from Human Papillomavirus
ACQKHTPPAPK

SEQ ID NO: 40246 - protein, 9 aa, Artificial Sequence
  Peptide Derived from Human Papillomavirus
ACVGVEVGR

SEQ ID NO: 40247 - protein, 10 aa, Artificial Sequence
  Peptide Derived from Human Papillomavirus
ADLDQFPLGR

SEQ ID NO: 40248 - protein, 11 aa, Artificial Sequence
  Peptide Derived from Human Papillomavirus
ADLDQFPLGRK

SEQ ID NO: 40249 - protein, 8 aa, Artificial Sequence
  Peptide Derived from Human Papillomavirus
ADVMTYIH

SEQ ID NO: 40250 - protein, 8 aa, Artificial Sequence
  Peptide Derived from Human Papillomavirus
AGLKAKPK

SEQ ID NO: 40251 - protein, 11 aa, Artificial Sequence
  Peptide Derived from Human Papillomavirus
AGTSRLLAVGH

SEQ ID NO: 40252 - protein, 9 aa, Artificial Sequence
  Peptide Derived from Human Papillomavirus
AISTSETTY

SEQ ID NO: 40253 - protein, 10 aa, Artificial Sequence
  Peptide Derived from Human Papillomavirus
AISTSETTYK

SEQ ID NO: 40254 - protein, 11 aa, Artificial Sequence
  Peptide Derived from Human Papillomavirus
AMDFTTLQANK

SEQ ID NO: 40255 - protein, 8 aa, Artificial Sequence
  Peptide Derived from Human Papillomavirus
ANAGVDNR

SEQ ID NO: 40256 - protein, 8 aa, Artificial Sequence
  Peptide Derived from Human Papillomavirus
ANLASSNY

SEQ ID NO: 40257 - protein, 11 aa, Artificial Sequence
  Peptide Derived from Human Papillomavirus
AVGENVPDDLY

SEQ ID NO: 40258 - protein, 10 aa, Artificial Sequence
  Peptide Derived from Human Papillomavirus
AVGHPYFPIK

SEQ ID NO: 40259 - protein, 11 aa, Artificial Sequence
  Peptide Derived from Human Papillomavirus
AVGHPYFPIKK

SEQ ID NO: 40260 - protein, 11 aa, Artificial Sequence
  Peptide Derived from Human Papillomavirus
CAAISTSETTY

SEQ ID NO: 40261 - protein, 10 aa, Artificial Sequence
  Peptide Derived from Human Papillomavirus
CTSICKYPDY

SEQ ID NO: 40262 - protein, 8 aa, Artificial Sequence
  Peptide Derived from Human Papillomavirus
CVGVEVGR

SEQ ID NO: 40263 - protein, 9 aa, Artificial Sequence
  Peptide Derived from Human Papillomavirus
DAQIFNKPY

SEQ ID NO: 40264 - protein, 9 aa, Artificial Sequence
  Peptide Derived from Human Papillomavirus
DDTENASAY

SEQ ID NO: 40265 - protein, 9 aa, Artificial Sequence
  Peptide Derived from Human Papillomavirus
DFTTLQANK

SEQ ID NO: 40266 - protein, 8 aa, Artificial Sequence
  Peptide Derived from Human Papillomavirus
DICTSICK

SEQ ID NO: 40267 - protein, 9 aa, Artificial Sequence
  Peptide Derived from Human Papillomavirus
DICTSICKY

SEQ ID NO: 40268 - protein, 9 aa, Artificial Sequence
  Peptide Derived from Human Papillomavirus
DLDQFPLGR

SEQ ID NO: 40269 - protein, 10 aa, Artificial Sequence
  Peptide Derived from Human Papillomavirus
DLDQFPLGRK

SEQ ID NO: 40270 - protein, 10 aa, Artificial Sequence
  Peptide Derived from Human Papillomavirus
DLQFIFQLCK

SEQ ID NO: 40271 - protein, 10 aa, Artificial Sequence
  Peptide Derived from Human Papillomavirus
DNRECISMDY

SEQ ID NO: 40272 - protein, 11 aa, Artificial Sequence
  Peptide Derived from Human Papillomavirus
DNRECISMDYK

SEQ ID NO: 40273 - protein, 8 aa, Artificial Sequence
  Peptide Derived from Human Papillomavirus
DSLFFYLR

SEQ ID NO: 40274 - protein, 9 aa, Artificial Sequence
  Peptide Derived from Human Papillomavirus
DSLFFYLRR

SEQ ID NO: 40275 - protein, 8 aa, Artificial Sequence
  Peptide Derived from Human Papillomavirus
DTENASAY

SEQ ID NO: 40276 - protein, 11 aa, Artificial Sequence
  Peptide Derived from Human Papillomavirus
DTSFYNPDTQR

SEQ ID NO: 40277 - protein, 8 aa, Artificial Sequence
  Peptide Derived from Human Papillomavirus
ECISMDYK

SEQ ID NO: 40278 - protein, 8 aa, Artificial Sequence
  Peptide Derived from Human Papillomavirus
ENDVNVYH

SEQ ID NO: 40279 - protein, 8 aa, Artificial Sequence
  Peptide Derived from Human Papillomavirus
ENVPDDLY

SEQ ID NO: 40280 - protein, 10 aa, Artificial Sequence
  Peptide Derived from Human Papillomavirus
ENVPDDLYIK

SEQ ID NO: 40281 - protein, 10 aa, Artificial Sequence
  Peptide Derived from Human Papillomavirus
ETTYKNTNFK

SEQ ID NO: 40282 - protein, 9 aa, Artificial Sequence
  Peptide Derived from Human Papillomavirus
FGFPDTSFY

SEQ ID NO: 40283 - protein, 10 aa, Artificial Sequence
  Peptide Derived from Human Papillomavirus
FIYILVITCY

SEQ ID NO: 40284 - protein, 8 aa, Artificial Sequence
  Peptide Derived from Human Papillomavirus
FLLQAGLK

SEQ ID NO: 40285 - protein, 10 aa, Artificial Sequence
  Peptide Derived from Human Papillomavirus
FLLQAGLKAK

SEQ ID NO: 40286 - protein, 9 aa, Artificial Sequence
  Peptide Derived from Human Papillomavirus
FNKPYWLQR

SEQ ID NO: 40287 - protein, 8 aa, Artificial Sequence
  Peptide Derived from Human Papillomavirus
FTTLQANK

SEQ ID NO: 40288 - protein, 8 aa, Artificial Sequence
  Peptide Derived from Human Papillomavirus
FVRHLFNR

SEQ ID NO: 40289 - protein, 11 aa, Artificial Sequence
  Peptide Derived from Human Papillomavirus
FVTSQAIACQK

SEQ ID NO: 40290 - protein, 9 aa, Artificial Sequence
  Peptide Derived from Human Papillomavirus
FVTVVDTTR

SEQ ID NO: 40291 - protein, 9 aa, Artificial Sequence
  Peptide Derived from Human Papillomavirus
GCKPPIGEH

SEQ ID NO: 40292 - protein, 9 aa, Artificial Sequence
  Peptide Derived from Human Papillomavirus
GDSLFFYLR

SEQ ID NO: 40293 - protein, 10 aa, Artificial Sequence
  Peptide Derived from Human Papillomavirus
GDSLFFYLRR

SEQ ID NO: 40294 - protein, 8 aa, Artificial Sequence
  Peptide Derived from Human Papillomavirus
GFPDTSFY

SEQ ID NO: 40295 - protein, 8 aa, Artificial Sequence
  Peptide Derived from Human Papillomavirus
GGTLEDTY

SEQ ID NO: 40296 - protein, 9 aa, Artificial Sequence
  Peptide Derived from Human Papillomavirus
GGTLEDTYR

SEQ ID NO: 40297 - protein, 10 aa, Artificial Sequence
  Peptide Derived from Human Papillomavirus
GISGHPLLNK

SEQ ID NO: 40298 - protein, 8 aa, Artificial Sequence
  Peptide Derived from Human Papillomavirus
GLQYRVFR

SEQ ID NO: 40299 - protein, 10 aa, Artificial Sequence
  Peptide Derived from Human Papillomavirus
GLQYRVFRIH

SEQ ID NO: 40300 - protein, 11 aa, Artificial Sequence
  Peptide Derived from Human Papillomavirus
GSTANLASSNY

SEQ ID NO: 40301 - protein, 8 aa, Artificial Sequence
  Peptide Derived from Human Papillomavirus
GTLEDTYR

SEQ ID NO: 40302 - protein, 10 aa, Artificial Sequence
  Peptide Derived from Human Papillomavirus
GTSRLLAVGH

SEQ ID NO: 40303 - protein, 9 aa, Artificial Sequence
  Peptide Derived from Human Papillomavirus
ICKYPDYIK

SEQ ID NO: 40304 - protein, 8 aa, Artificial Sequence
  Peptide Derived from Human Papillomavirus
ICTSICKY

SEQ ID NO: 40305 - protein, 11 aa, Artificial Sequence
  Peptide Derived from Human Papillomavirus
ICTSICKYPDY

SEQ ID NO: 40306 - protein, 10 aa, Artificial Sequence
  Peptide Derived from Human Papillomavirus
IFNKPYWLQR

SEQ ID NO: 40307 - protein, 10 aa, Artificial Sequence
  Peptide Derived from Human Papillomavirus
IGCKPPIGEH

SEQ ID NO: 40308 - protein, 11 aa, Artificial Sequence
  Peptide Derived from Human Papillomavirus
ILVPKVSGLQY

SEQ ID NO: 40309 - protein, 9 aa, Artificial Sequence
  Peptide Derived from Human Papillomavirus
ISGHPLLNK

SEQ ID NO: 40310 - protein, 8 aa, Artificial Sequence
  Peptide Derived from Human Papillomavirus
ISTSETTY

SEQ ID NO: 40311 - protein, 9 aa, Artificial Sequence
  Peptide Derived from Human Papillomavirus
ISTSETTYK

SEQ ID NO: 40312 - protein, 11 aa, Artificial Sequence
  Peptide Derived from Human Papillomavirus
ITCYENDVNVY

SEQ ID NO: 40313 - protein, 10 aa, Artificial Sequence
  Peptide Derived from Human Papillomavirus
ITLTADVMTY

SEQ ID NO: 40314 - protein, 10 aa, Artificial Sequence
  Peptide Derived from Human Papillomavirus
KAKPKFTLGK

SEQ ID NO: 40315 - protein, 11 aa, Artificial Sequence
  Peptide Derived from Human Papillomavirus
KAKPKFTLGKR

SEQ ID NO: 40316 - protein, 10 aa, Artificial Sequence
  Peptide Derived from Human Papillomavirus
KFGFPDTSFY

SEQ ID NO: 40317 - protein, 9 aa, Artificial Sequence
  Peptide Derived from Human Papillomavirus
KFLLQAGLK

SEQ ID NO: 40318 - protein, 11 aa, Artificial Sequence
  Peptide Derived from Human Papillomavirus
KFLLQAGLKAK

SEQ ID NO: 40319 - protein, 8 aa, Artificial Sequence
  Peptide Derived from Human Papillomavirus
KFTLGKRK

SEQ ID NO: 40320 - protein, 11 aa, Artificial Sequence
  Peptide Derived from Human Papillomavirus
KITLTADVMTY

SEQ ID NO: 40321 - protein, 11 aa, Artificial Sequence
  Peptide Derived from Human Papillomavirus
KLDDTENASAY

SEQ ID NO: 40322 - protein, 8 aa, Artificial Sequence
  Peptide Derived from Human Papillomavirus
KNTNFKEY

SEQ ID NO: 40323 - protein, 10 aa, Artificial Sequence
  Peptide Derived from Human Papillomavirus
KNTNFKEYLR

SEQ ID NO: 40324 - protein, 11 aa, Artificial Sequence
  Peptide Derived from Human Papillomavirus
KNTNFKEYLRH

SEQ ID NO: 40325 - protein, 8 aa, Artificial Sequence
  Peptide Derived from Human Papillomavirus
KVSGLQYR

SEQ ID NO: 40326 - protein, 11 aa, Artificial Sequence
  Peptide Derived from Human Papillomavirus
KVSGLQYRVFR

SEQ ID NO: 40327 - protein, 8 aa, Artificial Sequence
  Peptide Derived from Human Papillomavirus
KVVSTDEY

SEQ ID NO: 40328 - protein, 11 aa, Artificial Sequence
  Peptide Derived from Human Papillomavirus
KVVSTDEYVAR

SEQ ID NO: 40329 - protein, 11 aa, Artificial Sequence
  Peptide Derived from Human Papillomavirus
LAVGHPYFPIK

SEQ ID NO: 40330 - protein, 10 aa, Artificial Sequence
  Peptide Derived from Human Papillomavirus
LDDTENASAY

SEQ ID NO: 40331 - protein, 9 aa, Artificial Sequence
  Peptide Derived from Human Papillomavirus
LDICTSICK

SEQ ID NO: 40332 - protein, 10 aa, Artificial Sequence
  Peptide Derived from Human Papillomavirus
LDICTSICKY

SEQ ID NO: 40333 - protein, 8 aa, Artificial Sequence
  Peptide Derived from Human Papillomavirus
LDQFPLGR

SEQ ID NO: 40334 - protein, 9 aa, Artificial Sequence
  Peptide Derived from Human Papillomavirus
LDQFPLGRK

SEQ ID NO: 40335 - protein, 10 aa, Artificial Sequence
  Peptide Derived from Human Papillomavirus
LFVTVVDTTR

SEQ ID NO: 40336 - protein, 8 aa, Artificial Sequence
  Peptide Derived from Human Papillomavirus
LGVGISGH

SEQ ID NO: 40337 - protein, 11 aa, Artificial Sequence
  Peptide Derived from Human Papillomavirus
LIGCKPPIGEH

SEQ ID NO: 40338 - protein, 8 aa, Artificial Sequence
  Peptide Derived from Human Papillomavirus
LLAVGHPY

SEQ ID NO: 40339 - protein, 9 aa, Artificial Sequence
  Peptide Derived from Human Papillomavirus
LLQAGLKAK

SEQ ID NO: 40340 - protein, 11 aa, Artificial Sequence
  Peptide Derived from Human Papillomavirus
LLQAGLKAKPK

SEQ ID NO: 40341 - protein, 8 aa, Artificial Sequence
  Peptide Derived from Human Papillomavirus
LTADVMTY

SEQ ID NO: 40342 - protein, 10 aa, Artificial Sequence
  Peptide Derived from Human Papillomavirus
LTADVMTYIH

SEQ ID NO: 40343 - protein, 10 aa, Artificial Sequence
  Peptide Derived from Human Papillomavirus
LVPKVSGLQY

SEQ ID NO: 40344 - protein, 11 aa, Artificial Sequence
  Peptide Derived from Human Papillomavirus
LVPKVSGLQYR

SEQ ID NO: 40345 - protein, 10 aa, Artificial Sequence
  Peptide Derived from Human Papillomavirus
MDFTTLQANK

SEQ ID NO: 40346 - protein, 9 aa, Artificial Sequence
  Peptide Derived from Human Papillomavirus
MFVRHLFNR

SEQ ID NO: 40347 - protein, 11 aa, Artificial Sequence
  Peptide Derived from Human Papillomavirus
MVTSDAQIFNK

SEQ ID NO: 40348 - protein, 8 aa, Artificial Sequence
  Peptide Derived from Human Papillomavirus
NFKEYLRH

SEQ ID NO: 40349 - protein, 10 aa, Artificial Sequence
  Peptide Derived from Human Papillomavirus
NIYYHAGTSR

SEQ ID NO: 40350 - protein, 8 aa, Artificial Sequence
  Peptide Derived from Human Papillomavirus
NNKILVPK

SEQ ID NO: 40351 - protein, 9 aa, Artificial Sequence
  Peptide Derived from Human Papillomavirus
NNNKILVPK

SEQ ID NO: 40352 - protein, 9 aa, Artificial Sequence
  Peptide Derived from Human Papillomavirus
NTNFKEYLR

SEQ ID NO: 40353 - protein, 10 aa, Artificial Sequence
  Peptide Derived from Human Papillomavirus
NTNFKEYLRH

SEQ ID NO: 40354 - protein, 9 aa, Artificial Sequence
  Peptide Derived from Human Papillomavirus
NVPDDLYIK

SEQ ID NO: 40355 - protein, 9 aa, Artificial Sequence
  Peptide Derived from Human Papillomavirus
PAPKEDPLK

SEQ ID NO: 40356 - protein, 10 aa, Artificial Sequence
  Peptide Derived from Human Papillomavirus
PAPKEDPLKK

SEQ ID NO: 40357 - protein, 11 aa, Artificial Sequence
  Peptide Derived from Human Papillomavirus
PAPKEDPLKKY

SEQ ID NO: 40358 - protein, 11 aa, Artificial Sequence
  Peptide Derived from Human Papillomavirus
PDYIKMVSEPY

SEQ ID NO: 40359 - protein, 9 aa, Artificial Sequence
  Peptide Derived from Human Papillomavirus
PGGTLEDTY

SEQ ID NO: 40360 - protein, 10 aa, Artificial Sequence
  Peptide Derived from Human Papillomavirus
PGGTLEDTYR

SEQ ID NO: 40361 - protein, 8 aa, Artificial Sequence
  Peptide Derived from Human Papillomavirus
PIGEHWGK

SEQ ID NO: 40362 - protein, 9 aa, Artificial Sequence
  Peptide Derived from Human Papillomavirus
PIKKPNNNK

SEQ ID NO: 40363 - protein, 10 aa, Artificial Sequence
  Peptide Derived from Human Papillomavirus
PLDICTSICK

SEQ ID NO: 40364 - protein, 11 aa, Artificial Sequence
  Peptide Derived from Human Papillomavirus
PLDICTSICKY

SEQ ID NO: 40365 - protein, 9 aa, Artificial Sequence
  Peptide Derived from Human Papillomavirus
PLGVGISGH

SEQ ID NO: 40366 - protein, 10 aa, Artificial Sequence
  Peptide Derived from Human Papillomavirus
PNNNKILVPK

SEQ ID NO: 40367 - protein, 11 aa, Artificial Sequence
  Peptide Derived from Human Papillomavirus
PTTSSTSTTAK

SEQ ID NO: 40368 - protein, 11 aa, Artificial Sequence
  Peptide Derived from Human Papillomavirus
PVSKVVSTDEY

SEQ ID NO: 40369 - protein, 9 aa, Artificial Sequence
  Peptide Derived from Human Papillomavirus
QAGLKAKPK

SEQ ID NO: 40370 - protein, 8 aa, Artificial Sequence
  Peptide Derived from Human Papillomavirus
QAIACQKH

SEQ ID NO: 40371 - protein, 8 aa, Artificial Sequence
  Peptide Derived from Human Papillomavirus
QFIFQLCK

SEQ ID NO: 40372 - protein, 11 aa, Artificial Sequence
  Peptide Derived from Human Papillomavirus
QIFNKPYWLQR

SEQ ID NO: 40373 - protein, 8 aa, Artificial Sequence
  Peptide Derived from Human Papillomavirus
QLCLIGCK

SEQ ID NO: 40374 - protein, 11 aa, Artificial Sequence
  Peptide Derived from Human Papillomavirus
QLFVTVVDTTR

SEQ ID NO: 40375 - protein, 10 aa, Artificial Sequence
  Peptide Derived from Human Papillomavirus
QMFVRHLFNR

SEQ ID NO: 40376 - protein, 10 aa, Artificial Sequence
  Peptide Derived from Human Papillomavirus
QTQLCLIGCK

SEQ ID NO: 40377 - protein, 9 aa, Artificial Sequence
  Peptide Derived from Human Papillomavirus
RIHLPDPNK

SEQ ID NO: 40378 - protein, 9 aa, Artificial Sequence
  Peptide Derived from Human Papillomavirus
RLLAVGHPY

SEQ ID NO: 40379 - protein, 11 aa, Artificial Sequence
  Peptide Derived from Human Papillomavirus
SADLDQFPLGR

SEQ ID NO: 40380 - protein, 8 aa, Artificial Sequence
  Peptide Derived from Human Papillomavirus
SDAQIFNK

SEQ ID NO: 40381 - protein, 10 aa, Artificial Sequence
  Peptide Derived from Human Papillomavirus
SDAQIFNKPY

SEQ ID NO: 40382 - protein, 9 aa, Artificial Sequence
  Peptide Derived from Human Papillomavirus
SFYNPDTQR

SEQ ID NO: 40383 - protein, 8 aa, Artificial Sequence
  Peptide Derived from Human Papillomavirus
SGHPLLNK

SEQ ID NO: 40384 - protein, 9 aa, Artificial Sequence
  Peptide Derived from Human Papillomavirus
SGLQYRVFR

SEQ ID NO: 40385 - protein, 11 aa, Artificial Sequence
  Peptide Derived from Human Papillomavirus
SGLQYRVFRIH

SEQ ID NO: 40386 - protein, 8 aa, Artificial Sequence
  Peptide Derived from Human Papillomavirus
SICKYPDY

SEQ ID NO: 40387 - protein, 10 aa, Artificial Sequence
  Peptide Derived from Human Papillomavirus
SICKYPDYIK

SEQ ID NO: 40388 - protein, 8 aa, Artificial Sequence
  Peptide Derived from Human Papillomavirus
SLFFYLRR

SEQ ID NO: 40389 - protein, 11 aa, Artificial Sequence
  Peptide Derived from Human Papillomavirus
SLWLPSEATVY

SEQ ID NO: 40390 - protein, 8 aa, Artificial Sequence
  Peptide Derived from Human Papillomavirus
SSTSTTAK

SEQ ID NO: 40391 - protein, 9 aa, Artificial Sequence
  Peptide Derived from Human Papillomavirus
SSTSTTAKR

SEQ ID NO: 40392 - protein, 10 aa, Artificial Sequence
  Peptide Derived from Human Papillomavirus
SSTSTTAKRK

SEQ ID NO: 40393 - protein, 11 aa, Artificial Sequence
  Peptide Derived from Human Papillomavirus
SSTSTTAKRKK

SEQ ID NO: 40394 - protein, 10 aa, Artificial Sequence
  Peptide Derived from Human Papillomavirus
STANLASSNY

SEQ ID NO: 40395 - protein, 8 aa, Artificial Sequence
  Peptide Derived from Human Papillomavirus
STDEYVAR

SEQ ID NO: 40396 - protein, 8 aa, Artificial Sequence
  Peptide Derived from Human Papillomavirus
STSETTYK

SEQ ID NO: 40397 - protein, 8 aa, Artificial Sequence
  Peptide Derived from Human Papillomavirus
STSTTAKR

SEQ ID NO: 40398 - protein, 9 aa, Artificial Sequence
  Peptide Derived from Human Papillomavirus
STSTTAKRK

SEQ ID NO: 40399 - protein, 10 aa, Artificial Sequence
  Peptide Derived from Human Papillomavirus
STSTTAKRKK

SEQ ID NO: 40400 - protein, 11 aa, Artificial Sequence
  Peptide Derived from Human Papillomavirus
STSTTAKRKKR

SEQ ID NO: 40401 - protein, 8 aa, Artificial Sequence
  Peptide Derived from Human Papillomavirus
STTAKRKK

SEQ ID NO: 40402 - protein, 9 aa, Artificial Sequence
  Peptide Derived from Human Papillomavirus
STTAKRKKR

SEQ ID NO: 40403 - protein, 10 aa, Artificial Sequence
  Peptide Derived from Human Papillomavirus
STTAKRKKRK

SEQ ID NO: 40404 - protein, 9 aa, Artificial Sequence
  Peptide Derived from Human Papillomavirus
TADVMTYIH

SEQ ID NO: 40405 - protein, 8 aa, Artificial Sequence
  Peptide Derived from Human Papillomavirus
TAKRKKRK

SEQ ID NO: 40406 - protein, 9 aa, Artificial Sequence
  Peptide Derived from Human Papillomavirus
TANLASSNY

SEQ ID NO: 40407 - protein, 10 aa, Artificial Sequence
  Peptide Derived from Human Papillomavirus
TCYENDVNVY

SEQ ID NO: 40408 - protein, 11 aa, Artificial Sequence
  Peptide Derived from Human Papillomavirus
TCYENDVNVYH

SEQ ID NO: 40409 - protein, 11 aa, Artificial Sequence
  Peptide Derived from Human Papillomavirus
TDEYVARTNIY

SEQ ID NO: 40410 - protein, 11 aa, Artificial Sequence
  Peptide Derived from Human Papillomavirus
TFIYILVITCY

SEQ ID NO: 40411 - protein, 8 aa, Artificial Sequence
  Peptide Derived from Human Papillomavirus
TFWEVNLK

SEQ ID NO: 40412 - protein, 10 aa, Artificial Sequence
  Peptide Derived from Human Papillomavirus
TFWEVNLKEK

SEQ ID NO: 40413 - protein, 9 aa, Artificial Sequence
  Peptide Derived from Human Papillomavirus
TLTADVMTY

SEQ ID NO: 40414 - protein, 11 aa, Artificial Sequence
  Peptide Derived from Human Papillomavirus
TLTADVMTYIH

SEQ ID NO: 40415 - protein, 8 aa, Artificial Sequence
  Peptide Derived from Human Papillomavirus
TNFKEYLR

SEQ ID NO: 40416 - protein, 9 aa, Artificial Sequence
  Peptide Derived from Human Papillomavirus
TNFKEYLRH

SEQ ID NO: 40417 - protein, 11 aa, Artificial Sequence
  Peptide Derived from Human Papillomavirus
TNIYYHAGTSR

SEQ ID NO: 40418 - protein, 9 aa, Artificial Sequence
  Peptide Derived from Human Papillomavirus
TSDAQIFNK

SEQ ID NO: 40419 - protein, 11 aa, Artificial Sequence
  Peptide Derived from Human Papillomavirus
TSDAQIFNKPY

SEQ ID NO: 40420 - protein, 10 aa, Artificial Sequence
  Peptide Derived from Human Papillomavirus
TSFYNPDTQR

SEQ ID NO: 40421 - protein, 9 aa, Artificial Sequence
  Peptide Derived from Human Papillomavirus
TSICKYPDY

SEQ ID NO: 40422 - protein, 11 aa, Artificial Sequence
  Peptide Derived from Human Papillomavirus
TSICKYPDYIK

SEQ ID NO: 40423 - protein, 9 aa, Artificial Sequence
  Peptide Derived from Human Papillomavirus
TSQAIACQK

SEQ ID NO: 40424 - protein, 10 aa, Artificial Sequence
  Peptide Derived from Human Papillomavirus
TSQAIACQKH

SEQ ID NO: 40425 - protein, 9 aa, Artificial Sequence
  Peptide Derived from Human Papillomavirus
TSRLLAVGH

SEQ ID NO: 40426 - protein, 11 aa, Artificial Sequence
  Peptide Derived from Human Papillomavirus
TSRLLAVGHPY

SEQ ID NO: 40427 - protein, 9 aa, Artificial Sequence
  Peptide Derived from Human Papillomavirus
TSSTSTTAK

SEQ ID NO: 40428 - protein, 10 aa, Artificial Sequence
  Peptide Derived from Human Papillomavirus
TSSTSTTAKR

SEQ ID NO: 40429 - protein, 11 aa, Artificial Sequence
  Peptide Derived from Human Papillomavirus
TSSTSTTAKRK

SEQ ID NO: 40430 - protein, 8 aa, Artificial Sequence
  Peptide Derived from Human Papillomavirus
TSTTAKRK

SEQ ID NO: 40431 - protein, 9 aa, Artificial Sequence
  Peptide Derived from Human Papillomavirus
TSTTAKRKK

SEQ ID NO: 40432 - protein, 10 aa, Artificial Sequence
  Peptide Derived from Human Papillomavirus
TSTTAKRKKR

SEQ ID NO: 40433 - protein, 11 aa, Artificial Sequence
  Peptide Derived from Human Papillomavirus
TSTTAKRKKRK

SEQ ID NO: 40434 - protein, 8 aa, Artificial Sequence
  Peptide Derived from Human Papillomavirus
TTAKRKKR

SEQ ID NO: 40435 - protein, 9 aa, Artificial Sequence
  Peptide Derived from Human Papillomavirus
TTAKRKKRK

SEQ ID NO: 40436 - protein, 10 aa, Artificial Sequence
  Peptide Derived from Human Papillomavirus
TTSSTSTTAK

SEQ ID NO: 40437 - protein, 11 aa, Artificial Sequence
  Peptide Derived from Human Papillomavirus
TTSSTSTTAKR

SEQ ID NO: 40438 - protein, 9 aa, Artificial Sequence
  Peptide Derived from Human Papillomavirus
TTYKNTNFK

SEQ ID NO: 40439 - protein, 11 aa, Artificial Sequence
  Peptide Derived from Human Papillomavirus
TTYKNTNFKEY

SEQ ID NO: 40440 - protein, 11 aa, Artificial Sequence
  Peptide Derived from Human Papillomavirus
TVYLPPVPVSK

SEQ ID NO: 40441 - protein, 8 aa, Artificial Sequence
  Peptide Derived from Human Papillomavirus
VARTNIYY

SEQ ID NO: 40442 - protein, 9 aa, Artificial Sequence
  Peptide Derived from Human Papillomavirus
VARTNIYYH

SEQ ID NO: 40443 - protein, 11 aa, Artificial Sequence
  Peptide Derived from Human Papillomavirus
VDNRECISMDY

SEQ ID NO: 40444 - protein, 11 aa, Artificial Sequence
  Peptide Derived from Human Papillomavirus
VFRIHLPDPNK

SEQ ID NO: 40445 - protein, 10 aa, Artificial Sequence
  Peptide Derived from Human Papillomavirus
VGENVPDDLY

SEQ ID NO: 40446 - protein, 9 aa, Artificial Sequence
  Peptide Derived from Human Papillomavirus
VGHPYFPIK

SEQ ID NO: 40447 - protein, 10 aa, Artificial Sequence
  Peptide Derived from Human Papillomavirus
VGHPYFPIKK

SEQ ID NO: 40448 - protein, 11 aa, Artificial Sequence
  Peptide Derived from Human Papillomavirus
VGISGHPLLNK

SEQ ID NO: 40449 - protein, 10 aa, Artificial Sequence
  Peptide Derived from Human Papillomavirus
VSGLQYRVFR

SEQ ID NO: 40450 - protein, 10 aa, Artificial Sequence
  Peptide Derived from Human Papillomavirus
VSKVVSTDEY

SEQ ID NO: 40451 - protein, 9 aa, Artificial Sequence
  Peptide Derived from Human Papillomavirus
VSTDEYVAR

SEQ ID NO: 40452 - protein, 10 aa, Artificial Sequence
  Peptide Derived from Human Papillomavirus
VTSDAQIFNK

SEQ ID NO: 40453 - protein, 10 aa, Artificial Sequence
  Peptide Derived from Human Papillomavirus
VTSQAIACQK

SEQ ID NO: 40454 - protein, 11 aa, Artificial Sequence
  Peptide Derived from Human Papillomavirus
VTSQAIACQKH

SEQ ID NO: 40455 - protein, 8 aa, Artificial Sequence
  Peptide Derived from Human Papillomavirus
VTVVDTTR

SEQ ID NO: 40456 - protein, 10 aa, Artificial Sequence
  Peptide Derived from Human Papillomavirus
VVSTDEYVAR

SEQ ID NO: 40457 - protein, 10 aa, Artificial Sequence
  Peptide Derived from Human Papillomavirus
WACVGVEVGR

SEQ ID NO: 40458 - protein, 9 aa, Artificial Sequence
  Peptide Derived from Human Papillomavirus
WLPSEATVY

SEQ ID NO: 40459 - protein, 8 aa, Artificial Sequence
  Peptide Derived from Human Papillomavirus
WLQRAQGH

SEQ ID NO: 40460 - protein, 10 aa, Artificial Sequence
  Peptide Derived from Human Papillomavirus
YAANAGVDNR

SEQ ID NO: 40461 - protein, 11 aa, Artificial Sequence
  Peptide Derived from Human Papillomavirus
YDLQFIFQLCK

SEQ ID NO: 40462 - protein, 11 aa, Artificial Sequence
  Peptide Derived from Human Papillomavirus
YFPIKKPNNNK

SEQ ID NO: 40463 - protein, 8 aa, Artificial Sequence
  Peptide Derived from Human Papillomavirus
YGDSLFFY

SEQ ID NO: 40464 - protein, 10 aa, Artificial Sequence
  Peptide Derived from Human Papillomavirus
YGDSLFFYLR

SEQ ID NO: 40465 - protein, 11 aa, Artificial Sequence
  Peptide Derived from Human Papillomavirus
YGDSLFFYLRR

SEQ ID NO: 40466 - protein, 9 aa, Artificial Sequence
  Peptide Derived from Human Papillomavirus
YIKMVSEPY

SEQ ID NO: 40467 - protein, 8 aa, Artificial Sequence
  Peptide Derived from Human Papillomavirus
YILVITCY

SEQ ID NO: 40468 - protein, 9 aa, Artificial Sequence
  Peptide Derived from Human Papillomavirus
YLPPVPVSK

SEQ ID NO: 40469 - protein, 8 aa, Artificial Sequence
  Peptide Derived from Human Papillomavirus
YLRHGEEY

SEQ ID NO: 40470 - protein, 10 aa, Artificial Sequence
  Peptide Derived from Human Papillomavirus
YLRREQMFVR

SEQ ID NO: 40471 - protein, 11 aa, Artificial Sequence
  Peptide Derived from Human Papillomavirus
YLRREQMFVRH

SEQ ID NO: 40472 - protein, 9 aa, Artificial Sequence
  Peptide Derived from Human Papillomavirus
YTFWEVNLK

SEQ ID NO: 40473 - protein, 11 aa, Artificial Sequence
  Peptide Derived from Human Papillomavirus
YTFWEVNLKEK

SEQ ID NO: 40474 - protein, 8 aa, Artificial Sequence
  Peptide Derived from Human Papillomavirus
YVARTNIY

SEQ ID NO: 40475 - protein, 9 aa, Artificial Sequence
  Peptide Derived from Human Papillomavirus
YVARTNIYY

SEQ ID NO: 40476 - protein, 10 aa, Artificial Sequence
  Peptide Derived from Human Papillomavirus
YVARTNIYYH

SEQ ID NO: 40477 - protein, 9 aa, Artificial Sequence
  Peptide Derived from Human Papillomavirus
ADAGDFYLH

SEQ ID NO: 40478 - protein, 8 aa, Artificial Sequence
  Peptide Derived from Human Papillomavirus
AFITTPTK

SEQ ID NO: 40479 - protein, 10 aa, Artificial Sequence
  Peptide Derived from Human Papillomavirus
AGDFYLHPSY

SEQ ID NO: 40480 - protein, 11 aa, Artificial Sequence
  Peptide Derived from Human Papillomavirus
AGDFYLHPSYY

SEQ ID NO: 40481 - protein, 11 aa, Artificial Sequence
  Peptide Derived from Human Papillomavirus
AGTCPPDIIPK

SEQ ID NO: 40482 - protein, 10 aa, Artificial Sequence
  Peptide Derived from Human Papillomavirus
ALHRPALTSR

SEQ ID NO: 40483 - protein, 11 aa, Artificial Sequence
  Peptide Derived from Human Papillomavirus
ALHRPALTSRR

SEQ ID NO: 40484 - protein, 11 aa, Artificial Sequence
  Peptide Derived from Human Papillomavirus
ALPTSINNGLY

SEQ ID NO: 40485 - protein, 10 aa, Artificial Sequence
  Peptide Derived from Human Papillomavirus
ALTSRRTGIR

SEQ ID NO: 40486 - protein, 11 aa, Artificial Sequence
  Peptide Derived from Human Papillomavirus
ALTSRRTGIRY

SEQ ID NO: 40487 - protein, 11 aa, Artificial Sequence
  Peptide Derived from Human Papillomavirus
ANTTIPFGGAY

SEQ ID NO: 40488 - protein, 8 aa, Artificial Sequence
  Peptide Derived from Human Papillomavirus
ASATQLYK

SEQ ID NO: 40489 - protein, 11 aa, Artificial Sequence
  Peptide Derived from Human Papillomavirus
ASATQLYKTCK

SEQ ID NO: 40490 - protein, 9 aa, Artificial Sequence
  Peptide Derived from Human Papillomavirus
ATDTLAPVR

SEQ ID NO: 40491 - protein, 9 aa, Artificial Sequence
  Peptide Derived from Human Papillomavirus
ATQLYKTCK

SEQ ID NO: 40492 - protein, 8 aa, Artificial Sequence
  Peptide Derived from Human Papillomavirus
DAGDFYLH

SEQ ID NO: 40493 - protein, 11 aa, Artificial Sequence
  Peptide Derived from Human Papillomavirus
DAGDFYLHPSY

SEQ ID NO: 40494 - protein, 9 aa, Artificial Sequence
  Peptide Derived from Human Papillomavirus
DFLDIVALH

SEQ ID NO: 40495 - protein, 10 aa, Artificial Sequence
  Peptide Derived from Human Papillomavirus
DFLDIVALHR

SEQ ID NO: 40496 - protein, 8 aa, Artificial Sequence
  Peptide Derived from Human Papillomavirus
DFYLHPSY

SEQ ID NO: 40497 - protein, 9 aa, Artificial Sequence
  Peptide Derived from Human Papillomavirus
DFYLHPSYY

SEQ ID NO: 40498 - protein, 9 aa, Artificial Sequence
  Peptide Derived from Human Papillomavirus
DIIPKVEGK

SEQ ID NO: 40499 - protein, 10 aa, Artificial Sequence
  Peptide Derived from Human Papillomavirus
EGIDVDNTLY

SEQ ID NO: 40500 - protein, 10 aa, Artificial Sequence
  Peptide Derived from Human Papillomavirus
ELQTITPSTY

SEQ ID NO: 40501 - protein, 11 aa, Artificial Sequence
  Peptide Derived from Human Papillomavirus
FITTPTKLITY

SEQ ID NO: 40502 - protein, 8 aa, Artificial Sequence
  Peptide Derived from Human Papillomavirus
FLDIVALH

SEQ ID NO: 40503 - protein, 9 aa, Artificial Sequence
  Peptide Derived from Human Papillomavirus
FLDIVALHR

SEQ ID NO: 40504 - protein, 11 aa, Artificial Sequence
  Peptide Derived from Human Papillomavirus
FTLSSSTISTH

SEQ ID NO: 40505 - protein, 8 aa, Artificial Sequence
  Peptide Derived from Human Papillomavirus
GAKVHYYY

SEQ ID NO: 40506 - protein, 9 aa, Artificial Sequence
  Peptide Derived from Human Papillomavirus
GDFYLHPSY

SEQ ID NO: 40507 - protein, 10 aa, Artificial Sequence
  Peptide Derived from Human Papillomavirus
GDFYLHPSYY

SEQ ID NO: 40508 - protein, 9 aa, Artificial Sequence
  Peptide Derived from Human Papillomavirus
GIDVDNTLY

SEQ ID NO: 40509 - protein, 11 aa, Artificial Sequence
  Peptide Derived from Human Papillomavirus
GIGTGSGTGGR

SEQ ID NO: 40510 - protein, 10 aa, Artificial Sequence
  Peptide Derived from Human Papillomavirus
GIRYSRIGNK

SEQ ID NO: 40511 - protein, 11 aa, Artificial Sequence
  Peptide Derived from Human Papillomavirus
GLYSRTTQQVK

SEQ ID NO: 40512 - protein, 9 aa, Artificial Sequence
  Peptide Derived from Human Papillomavirus
GNKQTLRTR

SEQ ID NO: 40513 - protein, 10 aa, Artificial Sequence
  Peptide Derived from Human Papillomavirus
GSGTGGRTGY

SEQ ID NO: 40514 - protein, 11 aa, Artificial Sequence
  Peptide Derived from Human Papillomavirus
GSRPVARLGLY

SEQ ID NO: 40515 - protein, 10 aa, Artificial Sequence
  Peptide Derived from Human Papillomavirus
GTCPPDIIPK

SEQ ID NO: 40516 - protein, 8 aa, Artificial Sequence
  Peptide Derived from Human Papillomavirus
GTGGRTGY

SEQ ID NO: 40517 - protein, 9 aa, Artificial Sequence
  Peptide Derived from Human Papillomavirus
GTGSGTGGR

SEQ ID NO: 40518 - protein, 8 aa, Artificial Sequence
  Peptide Derived from Human Papillomavirus
IADAGDFY

SEQ ID NO: 40519 - protein, 10 aa, Artificial Sequence
  Peptide Derived from Human Papillomavirus
IADAGDFYLH

SEQ ID NO: 40520 - protein, 8 aa, Artificial Sequence
  Peptide Derived from Human Papillomavirus
IADQILQY

SEQ ID NO: 40521 - protein, 8 aa, Artificial Sequence
  Peptide Derived from Human Papillomavirus
IDVDNTLY

SEQ ID NO: 40522 - protein, 8 aa, Artificial Sequence
  Peptide Derived from Human Papillomavirus
IGAKVHYY

SEQ ID NO: 40523 - protein, 9 aa, Artificial Sequence
  Peptide Derived from Human Papillomavirus
IGAKVHYYY

SEQ ID NO: 40524 - protein, 8 aa, Artificial Sequence
  Peptide Derived from Human Papillomavirus
IGNKQTLR

SEQ ID NO: 40525 - protein, 10 aa, Artificial Sequence
  Peptide Derived from Human Papillomavirus
IGNKQTLRTR

SEQ ID NO: 40526 - protein, 10 aa, Artificial Sequence
  Peptide Derived from Human Papillomavirus
IGTGSGTGGR

SEQ ID NO: 40527 - protein, 9 aa, Artificial Sequence
  Peptide Derived from Human Papillomavirus
IIADAGDFY

SEQ ID NO: 40528 - protein, 11 aa, Artificial Sequence
  Peptide Derived from Human Papillomavirus
IIADAGDFYLH

SEQ ID NO: 40529 - protein, 8 aa, Artificial Sequence
  Peptide Derived from Human Papillomavirus
IIPKVEGK

SEQ ID NO: 40530 - protein, 9 aa, Artificial Sequence
  Peptide Derived from Human Papillomavirus
INNGLYDIY

SEQ ID NO: 40531 - protein, 11 aa, Artificial Sequence
  Peptide Derived from Human Papillomavirus
INNTVTTVTTH

SEQ ID NO: 40532 - protein, 11 aa, Artificial Sequence
  Peptide Derived from Human Papillomavirus
ITPSTYTTTSH

SEQ ID NO: 40533 - protein, 10 aa, Artificial Sequence
  Peptide Derived from Human Papillomavirus
ITTPTKLITY

SEQ ID NO: 40534 - protein, 8 aa, Artificial Sequence
  Peptide Derived from Human Papillomavirus
ITYDNPAY

SEQ ID NO: 40535 - protein, 8 aa, Artificial Sequence
  Peptide Derived from Human Papillomavirus
IVPGSPQY

SEQ ID NO: 40536 - protein, 10 aa, Artificial Sequence
  Peptide Derived from Human Papillomavirus
KLITYDNPAY

SEQ ID NO: 40537 - protein, 8 aa, Artificial Sequence
  Peptide Derived from Human Papillomavirus
KSIGAKVH

SEQ ID NO: 40538 - protein, 9 aa, Artificial Sequence
  Peptide Derived from Human Papillomavirus
KSIGAKVHY

SEQ ID NO: 40539 - protein, 10 aa, Artificial Sequence
  Peptide Derived from Human Papillomavirus
KSIGAKVHYY

SEQ ID NO: 40540 - protein, 11 aa, Artificial Sequence
  Peptide Derived from Human Papillomavirus
KSIGAKVHYYY

SEQ ID NO: 40541 - protein, 10 aa, Artificial Sequence
  Peptide Derived from Human Papillomavirus
KTIADQILQY

SEQ ID NO: 40542 - protein, 8 aa, Artificial Sequence
  Peptide Derived from Human Papillomavirus
LDIVALHR

SEQ ID NO: 40543 - protein, 11 aa, Artificial Sequence
  Peptide Derived from Human Papillomavirus
LIPIVPGSPQY

SEQ ID NO: 40544 - protein, 9 aa, Artificial Sequence
  Peptide Derived from Human Papillomavirus
LITYDNPAY

SEQ ID NO: 40545 - protein, 9 aa, Artificial Sequence
  Peptide Derived from Human Papillomavirus
LSSSTISTH

SEQ ID NO: 40546 - protein, 11 aa, Artificial Sequence
  Peptide Derived from Human Papillomavirus
LSSSTISTHNY

SEQ ID NO: 40547 - protein, 9 aa, Artificial Sequence
  Peptide Derived from Human Papillomavirus
LTSRRTGIR

SEQ ID NO: 40548 - protein, 10 aa, Artificial Sequence
  Peptide Derived from Human Papillomavirus
LTSRRTGIRY

SEQ ID NO: 40549 - protein, 8 aa, Artificial Sequence
  Peptide Derived from Human Papillomavirus
MLRKRRKR

SEQ ID NO: 40550 - protein, 11 aa, Artificial Sequence
  Peptide Derived from Human Papillomavirus
MLRKRRKRLPY

SEQ ID NO: 40551 - protein, 8 aa, Artificial Sequence
  Peptide Derived from Human Papillomavirus
NNGLYDIY

SEQ ID NO: 40552 - protein, 10 aa, Artificial Sequence
  Peptide Derived from Human Papillomavirus
NNTVTTVTTH

SEQ ID NO: 40553 - protein, 10 aa, Artificial Sequence
  Peptide Derived from Human Papillomavirus
NTTIPFGGAY

SEQ ID NO: 40554 - protein, 9 aa, Artificial Sequence
  Peptide Derived from Human Papillomavirus
NTVTTVTTH

SEQ ID NO: 40555 - protein, 9 aa, Artificial Sequence
  Peptide Derived from Human Papillomavirus
PAFITTPTK

SEQ ID NO: 40556 - protein, 11 aa, Artificial Sequence
  Peptide Derived from Human Papillomavirus
PALTSRRTGIR

SEQ ID NO: 40557 - protein, 10 aa, Artificial Sequence
  Peptide Derived from Human Papillomavirus
PDFLDIVALH

SEQ ID NO: 40558 - protein, 11 aa, Artificial Sequence
  Peptide Derived from Human Papillomavirus
PDFLDIVALHR

SEQ ID NO: 40559 - protein, 10 aa, Artificial Sequence
  Peptide Derived from Human Papillomavirus
PDIIPKVEGK

SEQ ID NO: 40560 - protein, 8 aa, Artificial Sequence
  Peptide Derived from Human Papillomavirus
PGSRPVAR

SEQ ID NO: 40561 - protein, 10 aa, Artificial Sequence
  Peptide Derived from Human Papillomavirus
PIPGSRPVAR

SEQ ID NO: 40562 - protein, 9 aa, Artificial Sequence
  Peptide Derived from Human Papillomavirus
PIVPGSPQY

SEQ ID NO: 40563 - protein, 8 aa, Artificial Sequence
  Peptide Derived from Human Papillomavirus
PSTSLSGY

SEQ ID NO: 40564 - protein, 9 aa, Artificial Sequence
  Peptide Derived from Human Papillomavirus
PSTYTTTSH

SEQ ID NO: 40565 - protein, 11 aa, Artificial Sequence
  Peptide Derived from Human Papillomavirus
PSVPSTSLSGY

SEQ ID NO: 40566 - protein, 8 aa, Artificial Sequence
  Peptide Derived from Human Papillomavirus
PSYYMLRK

SEQ ID NO: 40567 - protein, 9 aa, Artificial Sequence
  Peptide Derived from Human Papillomavirus
PSYYMLRKR

SEQ ID NO: 40568 - protein, 10 aa, Artificial Sequence
  Peptide Derived from Human Papillomavirus
PSYYMLRKRR

SEQ ID NO: 40569 - protein, 11 aa, Artificial Sequence
  Peptide Derived from Human Papillomavirus
PSYYMLRKRRK

SEQ ID NO: 40570 - protein, 11 aa, Artificial Sequence
  Peptide Derived from Human Papillomavirus
PTATDTLAPVR

SEQ ID NO: 40571 - protein, 9 aa, Artificial Sequence
  Peptide Derived from Human Papillomavirus
PTPAETGGH

SEQ ID NO: 40572 - protein, 9 aa, Artificial Sequence
  Peptide Derived from Human Papillomavirus
PTSINNGLY

SEQ ID NO: 40573 - protein, 8 aa, Artificial Sequence
  Peptide Derived from Human Papillomavirus
PVARLGLY

SEQ ID NO: 40574 - protein, 10 aa, Artificial Sequence
  Peptide Derived from Human Papillomavirus
PVARLGLYSR

SEQ ID NO: 40575 - protein, 8 aa, Artificial Sequence
  Peptide Derived from Human Papillomavirus
QTITPSTY

SEQ ID NO: 40576 - protein, 9 aa, Artificial Sequence
  Peptide Derived from Human Papillomavirus
QTLRTRSGK

SEQ ID NO: 40577 - protein, 8 aa, Artificial Sequence
  Peptide Derived from Human Papillomavirus
RASATQLY

SEQ ID NO: 40578 - protein, 9 aa, Artificial Sequence
  Peptide Derived from Human Papillomavirus
RASATQLYK

SEQ ID NO: 40579 - protein, 9 aa, Artificial Sequence
  Peptide Derived from Human Papillomavirus
RIGNKQTLR

SEQ ID NO: 40580 - protein, 11 aa, Artificial Sequence
  Peptide Derived from Human Papillomavirus
RIGNKQTLRTR

SEQ ID NO: 40581 - protein, 8 aa, Artificial Sequence
  Peptide Derived from Human Papillomavirus
RSAKRTKR

SEQ ID NO: 40582 - protein, 9 aa, Artificial Sequence
  Peptide Derived from Human Papillomavirus
RSGKSIGAK

SEQ ID NO: 40583 - protein, 11 aa, Artificial Sequence
  Peptide Derived from Human Papillomavirus
RSGKSIGAKVH

SEQ ID NO: 40584 - protein, 8 aa, Artificial Sequence
  Peptide Derived from Human Papillomavirus
RTGIRYSR

SEQ ID NO: 40585 - protein, 10 aa, Artificial Sequence
  Peptide Derived from Human Papillomavirus
RTGYIPLGTR

SEQ ID NO: 40586 - protein, 11 aa, Artificial Sequence
  Peptide Derived from Human Papillomavirus
RTKRASATQLY

SEQ ID NO: 40587 - protein, 11 aa, Artificial Sequence
  Peptide Derived from Human Papillomavirus
RTRSGKSIGAK

SEQ ID NO: 40588 - protein, 10 aa, Artificial Sequence
  Peptide Derived from Human Papillomavirus
SATQLYKTCK

SEQ ID NO: 40589 - protein, 8 aa, Artificial Sequence
  Peptide Derived from Human Papillomavirus
SGKSIGAK

SEQ ID NO: 40590 - protein, 10 aa, Artificial Sequence
  Peptide Derived from Human Papillomavirus
SGKSIGAKVH

SEQ ID NO: 40591 - protein, 11 aa, Artificial Sequence
  Peptide Derived from Human Papillomavirus
SGKSIGAKVHY

SEQ ID NO: 40592 - protein, 9 aa, Artificial Sequence
  Peptide Derived from Human Papillomavirus
SGTGGRTGY

SEQ ID NO: 40593 - protein, 8 aa, Artificial Sequence
  Peptide Derived from Human Papillomavirus
SIGAKVHY

SEQ ID NO: 40594 - protein, 9 aa, Artificial Sequence
  Peptide Derived from Human Papillomavirus
SIGAKVHYY

SEQ ID NO: 40595 - protein, 10 aa, Artificial Sequence
  Peptide Derived from Human Papillomavirus
SIGAKVHYYY

SEQ ID NO: 40596 - protein, 10 aa, Artificial Sequence
  Peptide Derived from Human Papillomavirus
SINNGLYDIY

SEQ ID NO: 40597 - protein, 8 aa, Artificial Sequence
  Peptide Derived from Human Papillomavirus
SSSTISTH

SEQ ID NO: 40598 - protein, 10 aa, Artificial Sequence
  Peptide Derived from Human Papillomavirus
SSSTISTHNY

SEQ ID NO: 40599 - protein, 9 aa, Artificial Sequence
  Peptide Derived from Human Papillomavirus
SSTISTHNY

SEQ ID NO: 40600 - protein, 9 aa, Artificial Sequence
  Peptide Derived from Human Papillomavirus
SSTPIPGSR

SEQ ID NO: 40601 - protein, 8 aa, Artificial Sequence
  Peptide Derived from Human Papillomavirus
STISTHNY

SEQ ID NO: 40602 - protein, 8 aa, Artificial Sequence
  Peptide Derived from Human Papillomavirus
STPIPGSR

SEQ ID NO: 40603 - protein, 8 aa, Artificial Sequence
  Peptide Derived from Human Papillomavirus
STYTTTSH

SEQ ID NO: 40604 - protein, 10 aa, Artificial Sequence
  Peptide Derived from Human Papillomavirus
SVPSTSLSGY

SEQ ID NO: 40605 - protein, 10 aa, Artificial Sequence
  Peptide Derived from Human Papillomavirus
TATDTLAPVR

SEQ ID NO: 40606 - protein, 9 aa, Artificial Sequence
  Peptide Derived from Human Papillomavirus
TCPPDIIPK

SEQ ID NO: 40607 - protein, 8 aa, Artificial Sequence
  Peptide Derived from Human Papillomavirus
TDTLAPVR

SEQ ID NO: 40608 - protein, 11 aa, Artificial Sequence
  Peptide Derived from Human Papillomavirus
TGIRYSRIGNK

SEQ ID NO: 40609 - protein, 8 aa, Artificial Sequence
  Peptide Derived from Human Papillomavirus
TGSGTGGR

SEQ ID NO: 40610 - protein, 11 aa, Artificial Sequence
  Peptide Derived from Human Papillomavirus
TGSGTGGRTGY

SEQ ID NO: 40611 - protein, 9 aa, Artificial Sequence
  Peptide Derived from Human Papillomavirus
TGYIPLGTR

SEQ ID NO: 40612 - protein, 9 aa, Artificial Sequence
  Peptide Derived from Human Papillomavirus
TIADQILQY

SEQ ID NO: 40613 - protein, 10 aa, Artificial Sequence
  Peptide Derived from Human Papillomavirus
TIIADAGDFY

SEQ ID NO: 40614 - protein, 8 aa, Artificial Sequence
  Peptide Derived from Human Papillomavirus
TIPFGGAY

SEQ ID NO: 40615 - protein, 8 aa, Artificial Sequence
  Peptide Derived from Human Papillomavirus
TLRTRSGK

SEQ ID NO: 40616 - protein, 10 aa, Artificial Sequence
  Peptide Derived from Human Papillomavirus
TLSSSTISTH

SEQ ID NO: 40617 - protein, 8 aa, Artificial Sequence
  Peptide Derived from Human Papillomavirus
TSINNGLY

SEQ ID NO: 40618 - protein, 11 aa, Artificial Sequence
  Peptide Derived from Human Papillomavirus
TSINNGLYDIY

SEQ ID NO: 40619 - protein, 8 aa, Artificial Sequence
  Peptide Derived from Human Papillomavirus
TSRRTGIR

SEQ ID NO: 40620 - protein, 9 aa, Artificial Sequence
  Peptide Derived from Human Papillomavirus
TSRRTGIRY

SEQ ID NO: 40621 - protein, 11 aa, Artificial Sequence
  Peptide Derived from Human Papillomavirus
TSRRTGIRYSR

SEQ ID NO: 40622 - protein, 10 aa, Artificial Sequence
  Peptide Derived from Human Papillomavirus
TSSTPIPGSR

SEQ ID NO: 40623 - protein, 9 aa, Artificial Sequence
  Peptide Derived from Human Papillomavirus
TTIPFGGAY

SEQ ID NO: 40624 - protein, 9 aa, Artificial Sequence
  Peptide Derived from Human Papillomavirus
TTPTKLITY

SEQ ID NO: 40625 - protein, 8 aa, Artificial Sequence
  Peptide Derived from Human Papillomavirus
TVTTVTTH

SEQ ID NO: 40626 - protein, 11 aa, Artificial Sequence
  Peptide Derived from Human Papillomavirus
VALHRPALTSR

SEQ ID NO: 40627 - protein, 9 aa, Artificial Sequence
  Peptide Derived from Human Papillomavirus
VARLGLYSR

SEQ ID NO: 40628 - protein, 11 aa, Artificial Sequence
  Peptide Derived from Human Papillomavirus
VDPAFITTPTK

SEQ ID NO: 40629 - protein, 11 aa, Artificial Sequence
  Peptide Derived from Human Papillomavirus
VTSSTPIPGSR

SEQ ID NO: 40630 - protein, 10 aa, Artificial Sequence
  Peptide Derived from Human Papillomavirus
YLHPSYYMLR

SEQ ID NO: 40631 - protein, 11 aa, Artificial Sequence
  Peptide Derived from Human Papillomavirus
YLHPSYYMLRK

SEQ ID NO: 40632 - protein, 8 aa, Artificial Sequence
  Peptide Derived from Human Papillomavirus
YMLRKRRK

SEQ ID NO: 40633 - protein, 9 aa, Artificial Sequence
  Peptide Derived from Human Papillomavirus
YMLRKRRKR

SEQ ID NO: 40634 - protein, 11 aa, Artificial Sequence
  Peptide Derived from Human Papillomavirus
YSRIGNKQTLR

SEQ ID NO: 40635 - protein, 9 aa, Artificial Sequence
  Peptide Derived from Human Papillomavirus
YSRTTQQVK

SEQ ID NO: 40636 - protein, 11 aa, Artificial Sequence
  Peptide Derived from Human Papillomavirus
YTIIADAGDFY

SEQ ID NO: 40637 - protein, 11 aa, Artificial Sequence
  Peptide Derived from Human Papillomavirus
AAFLKSNCQAK

SEQ ID NO: 40638 - protein, 10 aa, Artificial Sequence
  Peptide Derived from Human Papillomavirus
AFLKSNCQAK

SEQ ID NO: 40639 - protein, 11 aa, Artificial Sequence
  Peptide Derived from Human Papillomavirus
AFLKSNCQAKY

SEQ ID NO: 40640 - protein, 11 aa, Artificial Sequence
  Peptide Derived from Human Papillomavirus
ALDGNPISIDR

SEQ ID NO: 40641 - protein, 9 aa, Artificial Sequence
  Peptide Derived from Human Papillomavirus
ALFHAQEVH

SEQ ID NO: 40642 - protein, 11 aa, Artificial Sequence
  Peptide Derived from Human Papillomavirus
ALKSFLKGTPK

SEQ ID NO: 40643 - protein, 9 aa, Artificial Sequence
  Peptide Derived from Human Papillomavirus
ALLRYKCGK

SEQ ID NO: 40644 - protein, 11 aa, Artificial Sequence
  Peptide Derived from Human Papillomavirus
ALLRYKCGKSR

SEQ ID NO: 40645 - protein, 10 aa, Artificial Sequence
  Peptide Derived from Human Papillomavirus
AMLAVFKDTY

SEQ ID NO: 40646 - protein, 8 aa, Artificial Sequence
  Peptide Derived from Human Papillomavirus
ATMCKHYR

SEQ ID NO: 40647 - protein, 9 aa, Artificial Sequence
  Peptide Derived from Human Papillomavirus
ATMCKHYRR

SEQ ID NO: 40648 - protein, 8 aa, Artificial Sequence
  Peptide Derived from Human Papillomavirus
ATTTCWTY

SEQ ID NO: 40649 - protein, 11 aa, Artificial Sequence
  Peptide Derived from Human Papillomavirus
AVISFVNSTSH

SEQ ID NO: 40650 - protein, 8 aa, Artificial Sequence
  Peptide Derived from Human Papillomavirus
CATMCKHY

SEQ ID NO: 40651 - protein, 9 aa, Artificial Sequence
  Peptide Derived from Human Papillomavirus
CATMCKHYR

SEQ ID NO: 40652 - protein, 10 aa, Artificial Sequence
  Peptide Derived from Human Papillomavirus
CATMCKHYRR

SEQ ID NO: 40653 - protein, 9 aa, Artificial Sequence
  Peptide Derived from Human Papillomavirus
CFFERTWSR

SEQ ID NO: 40654 - protein, 10 aa, Artificial Sequence
  Peptide Derived from Human Papillomavirus
CGKSRLTVAK

SEQ ID NO: 40655 - protein, 8 aa, Artificial Sequence
  Peptide Derived from Human Papillomavirus
CGPANTGK

SEQ ID NO: 40656 - protein, 10 aa, Artificial Sequence
  Peptide Derived from Human Papillomavirus
CGPANTGKSY

SEQ ID NO: 40657 - protein, 8 aa, Artificial Sequence
  Peptide Derived from Human Papillomavirus
CMLIQPPK

SEQ ID NO: 40658 - protein, 10 aa, Artificial Sequence
  Peptide Derived from Human Papillomavirus
CMLIQPPKLR

SEQ ID NO: 40659 - protein, 11 aa, Artificial Sequence
  Peptide Derived from Human Papillomavirus
CSKIDEGGDWR

SEQ ID NO: 40660 - protein, 11 aa, Artificial Sequence
  Peptide Derived from Human Papillomavirus
CTIAQLKDLLK

SEQ ID NO: 40661 - protein, 9 aa, Artificial Sequence
  Peptide Derived from Human Papillomavirus
DAQVLHVLK

SEQ ID NO: 40662 - protein, 10 aa, Artificial Sequence
  Peptide Derived from Human Papillomavirus
DAQVLHVLKR

SEQ ID NO: 40663 - protein, 11 aa, Artificial Sequence
  Peptide Derived from Human Papillomavirus
DAQVLHVLKRK

SEQ ID NO: 40664 - protein, 9 aa, Artificial Sequence
  Peptide Derived from Human Papillomavirus
DATTTCWTY

SEQ ID NO: 40665 - protein, 8 aa, Artificial Sequence
  Peptide Derived from Human Papillomavirus
DCATMCKH

SEQ ID NO: 40666 - protein, 9 aa, Artificial Sequence
  Peptide Derived from Human Papillomavirus
DCATMCKHY

SEQ ID NO: 40667 - protein, 10 aa, Artificial Sequence
  Peptide Derived from Human Papillomavirus
DCATMCKHYR

SEQ ID NO: 40668 - protein, 11 aa, Artificial Sequence
  Peptide Derived from Human Papillomavirus
DCATMCKHYRR

SEQ ID NO: 40669 - protein, 10 aa, Artificial Sequence
  Peptide Derived from Human Papillomavirus
DDATTTCWTY

SEQ ID NO: 40670 - protein, 9 aa, Artificial Sequence
  Peptide Derived from Human Papillomavirus
DGNPISIDR

SEQ ID NO: 40671 - protein, 10 aa, Artificial Sequence
  Peptide Derived from Human Papillomavirus
DGNPISIDRK

SEQ ID NO: 40672 - protein, 11 aa, Artificial Sequence
  Peptide Derived from Human Papillomavirus
DGNPISIDRKH

SEQ ID NO: 40673 - protein, 8 aa, Artificial Sequence
  Peptide Derived from Human Papillomavirus
DLLKVNNK

SEQ ID NO: 40674 - protein, 10 aa, Artificial Sequence
  Peptide Derived from Human Papillomavirus
DLVRNFKSDK

SEQ ID NO: 40675 - protein, 10 aa, Artificial Sequence
  Peptide Derived from Human Papillomavirus
DNRWPYLESR

SEQ ID NO: 40676 - protein, 11 aa, Artificial Sequence
  Peptide Derived from Human Papillomavirus
DSNSNAAAFLK

SEQ ID NO: 40677 - protein, 11 aa, Artificial Sequence
  Peptide Derived from Human Papillomavirus
DTEGNPFGTFK

SEQ ID NO: 40678 - protein, 8 aa, Artificial Sequence
  Peptide Derived from Human Papillomavirus
DTPEWIQR

SEQ ID NO: 40679 - protein, 10 aa, Artificial Sequence
  Peptide Derived from Human Papillomavirus
EFITFLGALK

SEQ ID NO: 40680 - protein, 10 aa, Artificial Sequence
  Peptide Derived from Human Papillomavirus
EFPNAFPFDK

SEQ ID NO: 40681 - protein, 9 aa, Artificial Sequence
  Peptide Derived from Human Papillomavirus
EGNPFGTFK

SEQ ID NO: 40682 - protein, 11 aa, Artificial Sequence
  Peptide Derived from Human Papillomavirus
EGNPFGTFKLR

SEQ ID NO: 40683 - protein, 10 aa, Artificial Sequence
  Peptide Derived from Human Papillomavirus
EGTGCNGWFY

SEQ ID NO: 40684 - protein, 8 aa, Artificial Sequence
  Peptide Derived from Human Papillomavirus
EINDKNWK

SEQ ID NO: 40685 - protein, 9 aa, Artificial Sequence
  Peptide Derived from Human Papillomavirus
EISLNSGQK

SEQ ID NO: 40686 - protein, 10 aa, Artificial Sequence
  Peptide Derived from Human Papillomavirus
EISLNSGQKK

SEQ ID NO: 40687 - protein, 10 aa, Artificial Sequence
  Peptide Derived from Human Papillomavirus
ELETAQALFH

SEQ ID NO: 40688 - protein, 8 aa, Artificial Sequence
  Peptide Derived from Human Papillomavirus
ENSPLGER

SEQ ID NO: 40689 - protein, 8 aa, Artificial Sequence
  Peptide Derived from Human Papillomavirus
ESDMAFEY

SEQ ID NO: 40690 - protein, 8 aa, Artificial Sequence
  Peptide Derived from Human Papillomavirus
ETAQALFH

SEQ ID NO: 40691 - protein, 10 aa, Artificial Sequence
  Peptide Derived from Human Papillomavirus
ETCMLIQPPK

SEQ ID NO: 40692 - protein, 9 aa, Artificial Sequence
  Peptide Derived from Human Papillomavirus
EVDTELSPR

SEQ ID NO: 40693 - protein, 10 aa, Artificial Sequence
  Peptide Derived from Human Papillomavirus
EVHNDAQVLH

SEQ ID NO: 40694 - protein, 9 aa, Artificial Sequence
  Peptide Derived from Human Papillomavirus
FCGPANTGK

SEQ ID NO: 40695 - protein, 11 aa, Artificial Sequence
  Peptide Derived from Human Papillomavirus
FCGPANTGKSY

SEQ ID NO: 40696 - protein, 9 aa, Artificial Sequence
  Peptide Derived from Human Papillomavirus
FDKNGNPVY

SEQ ID NO: 40697 - protein, 8 aa, Artificial Sequence
  Peptide Derived from Human Papillomavirus
FFERTWSR

SEQ ID NO: 40698 - protein, 9 aa, Artificial Sequence
  Peptide Derived from Human Papillomavirus
FITFLGALK

SEQ ID NO: 40699 - protein, 10 aa, Artificial Sequence
  Peptide Derived from Human Papillomavirus
FLGALKSFLK

SEQ ID NO: 40700 - protein, 8 aa, Artificial Sequence
  Peptide Derived from Human Papillomavirus
FLKGTPKK

SEQ ID NO: 40701 - protein, 9 aa, Artificial Sequence
  Peptide Derived from Human Papillomavirus
FLKSNCQAK

SEQ ID NO: 40702 - protein, 10 aa, Artificial Sequence
  Peptide Derived from Human Papillomavirus
FLKSNCQAKY

SEQ ID NO: 40703 - protein, 9 aa, Artificial Sequence
  Peptide Derived from Human Papillomavirus
FTDLVRNFK

SEQ ID NO: 40704 - protein, 8 aa, Artificial Sequence
  Peptide Derived from Human Papillomavirus
FTISDSGY

SEQ ID NO: 40705 - protein, 8 aa, Artificial Sequence
  Peptide Derived from Human Papillomavirus
GALKSFLK

SEQ ID NO: 40706 - protein, 8 aa, Artificial Sequence
  Peptide Derived from Human Papillomavirus
GAMLAVFK

SEQ ID NO: 40707 - protein, 11 aa, Artificial Sequence
  Peptide Derived from Human Papillomavirus
GAMLAVFKDTY

SEQ ID NO: 40708 - protein, 9 aa, Artificial Sequence
  Peptide Derived from Human Papillomavirus
GDTPEWIQR

SEQ ID NO: 40709 - protein, 11 aa, Artificial Sequence
  Peptide Derived from Human Papillomavirus
GDWRPIVQFLR

SEQ ID NO: 40710 - protein, 9 aa, Artificial Sequence
  Peptide Derived from Human Papillomavirus
GLSFTDLVR

SEQ ID NO: 40711 - protein, 8 aa, Artificial Sequence
  Peptide Derived from Human Papillomavirus
GNPFGTFK

SEQ ID NO: 40712 - protein, 10 aa, Artificial Sequence
  Peptide Derived from Human Papillomavirus
GNPFGTFKLR

SEQ ID NO: 40713 - protein, 8 aa, Artificial Sequence
  Peptide Derived from Human Papillomavirus
GNPISIDR

SEQ ID NO: 40714 - protein, 9 aa, Artificial Sequence
  Peptide Derived from Human Papillomavirus
GNPISIDRK

SEQ ID NO: 40715 - protein, 10 aa, Artificial Sequence
  Peptide Derived from Human Papillomavirus
GNPISIDRKH

SEQ ID NO: 40716 - protein, 11 aa, Artificial Sequence
  Peptide Derived from Human Papillomavirus
GNPISIDRKHK

SEQ ID NO: 40717 - protein, 10 aa, Artificial Sequence
  Peptide Derived from Human Papillomavirus
GNPVYEINDK

SEQ ID NO: 40718 - protein, 11 aa, Artificial Sequence
  Peptide Derived from Human Papillomavirus
GSTENSPLGER

SEQ ID NO: 40719 - protein, 11 aa, Artificial Sequence
  Peptide Derived from Human Papillomavirus
GTFKLRAGQNH

SEQ ID NO: 40720 - protein, 9 aa, Artificial Sequence
  Peptide Derived from Human Papillomavirus
GTGCNGWFY

SEQ ID NO: 40721 - protein, 9 aa, Artificial Sequence
  Peptide Derived from Human Papillomavirus
GVLILALLR

SEQ ID NO: 40722 - protein, 10 aa, Artificial Sequence
  Peptide Derived from Human Papillomavirus
GVLILALLRY

SEQ ID NO: 40723 - protein, 11 aa, Artificial Sequence
  Peptide Derived from Human Papillomavirus
GVLILALLRYK

SEQ ID NO: 40724 - protein, 11 aa, Artificial Sequence
  Peptide Derived from Human Papillomavirus
GVNPTIAEGFK

SEQ ID NO: 40725 - protein, 11 aa, Artificial Sequence
  Peptide Derived from Human Papillomavirus
HFWLEPLTDTK

SEQ ID NO: 40726 - protein, 8 aa, Artificial Sequence
  Peptide Derived from Human Papillomavirus
HIQCLDCK

SEQ ID NO: 40727 - protein, 8 aa, Artificial Sequence
  Peptide Derived from Human Papillomavirus
HNDAQVLH

SEQ ID NO: 40728 - protein, 11 aa, Artificial Sequence
  Peptide Derived from Human Papillomavirus
HNDAQVLHVLK

SEQ ID NO: 40729 - protein, 9 aa, Artificial Sequence
  Peptide Derived from Human Papillomavirus
IAQLKDLLK

SEQ ID NO: 40730 - protein, 8 aa, Artificial Sequence
  Peptide Derived from Human Papillomavirus
IDEGGDWR

SEQ ID NO: 40731 - protein, 8 aa, Artificial Sequence
  Peptide Derived from Human Papillomavirus
ILALLRYK

SEQ ID NO: 40732 - protein, 11 aa, Artificial Sequence
  Peptide Derived from Human Papillomavirus
ILALLRYKCGK

SEQ ID NO: 40733 - protein, 8 aa, Artificial Sequence
  Peptide Derived from Human Papillomavirus
ILLTTNIH

SEQ ID NO: 40734 - protein, 11 aa, Artificial Sequence
  Peptide Derived from Human Papillomavirus
ILLTTNIHPAK

SEQ ID NO: 40735 - protein, 9 aa, Artificial Sequence
  Peptide Derived from Human Papillomavirus
ISFVNSTSH

SEQ ID NO: 40736 - protein, 8 aa, Artificial Sequence
  Peptide Derived from Human Papillomavirus
ISIDRKHK

SEQ ID NO: 40737 - protein, 8 aa, Artificial Sequence
  Peptide Derived from Human Papillomavirus
ISLNSGQK

SEQ ID NO: 40738 - protein, 9 aa, Artificial Sequence
  Peptide Derived from Human Papillomavirus
ISLNSGQKK

SEQ ID NO: 40739 - protein, 11 aa, Artificial Sequence
  Peptide Derived from Human Papillomavirus
ISLNSGQKKAK

SEQ ID NO: 40740 - protein, 8 aa, Artificial Sequence
  Peptide Derived from Human Papillomavirus
ITFLGALK

SEQ ID NO: 40741 - protein, 10 aa, Artificial Sequence
  Peptide Derived from Human Papillomavirus
KCFFERTWSR

SEQ ID NO: 40742 - protein, 11 aa, Artificial Sequence
  Peptide Derived from Human Papillomavirus
KCGKSRLTVAK

SEQ ID NO: 40743 - protein, 8 aa, Artificial Sequence
  Peptide Derived from Human Papillomavirus
KDCATMCK

SEQ ID NO: 40744 - protein, 9 aa, Artificial Sequence
  Peptide Derived from Human Papillomavirus
KDCATMCKH

SEQ ID NO: 40745 - protein, 10 aa, Artificial Sequence
  Peptide Derived from Human Papillomavirus
KDCATMCKHY

SEQ ID NO: 40746 - protein, 11 aa, Artificial Sequence
  Peptide Derived from Human Papillomavirus
KDCATMCKHYR

SEQ ID NO: 40747 - protein, 9 aa, Artificial Sequence
  Peptide Derived from Human Papillomavirus
KDLLKVNNK

SEQ ID NO: 40748 - protein, 11 aa, Artificial Sequence
  Peptide Derived from Human Papillomavirus
KDNRWPYLESR

SEQ ID NO: 40749 - protein, 8 aa, Artificial Sequence
  Peptide Derived from Human Papillomavirus
KGLSTLLH

SEQ ID NO: 40750 - protein, 9 aa, Artificial Sequence
  Peptide Derived from Human Papillomavirus
KIDEGGDWR

SEQ ID NO: 40751 - protein, 8 aa, Artificial Sequence
  Peptide Derived from Human Papillomavirus
KLRAGQNH

SEQ ID NO: 40752 - protein, 9 aa, Artificial Sequence
  Peptide Derived from Human Papillomavirus
KLRAGQNHR

SEQ ID NO: 40753 - protein, 10 aa, Artificial Sequence
  Peptide Derived from Human Papillomavirus
KLRSSVAALY

SEQ ID NO: 40754 - protein, 9 aa, Artificial Sequence
  Peptide Derived from Human Papillomavirus
KNWKCFFER

SEQ ID NO: 40755 - protein, 9 aa, Artificial Sequence
  Peptide Derived from Human Papillomavirus
KSFLKGTPK

SEQ ID NO: 40756 - protein, 10 aa, Artificial Sequence
  Peptide Derived from Human Papillomavirus
KSFLKGTPKK

SEQ ID NO: 40757 - protein, 8 aa, Artificial Sequence
  Peptide Derived from Human Papillomavirus
KSNCQAKY

SEQ ID NO: 40758 - protein, 10 aa, Artificial Sequence
  Peptide Derived from Human Papillomavirus
KSNCQAKYLK

SEQ ID NO: 40759 - protein, 8 aa, Artificial Sequence
  Peptide Derived from Human Papillomavirus
KSRLTVAK

SEQ ID NO: 40760 - protein, 10 aa, Artificial Sequence
  Peptide Derived from Human Papillomavirus
KSYFGMSFIH

SEQ ID NO: 40761 - protein, 10 aa, Artificial Sequence
  Peptide Derived from Human Papillomavirus
KTLIQPFILY

SEQ ID NO: 40762 - protein, 10 aa, Artificial Sequence
  Peptide Derived from Human Papillomavirus
LALLRYKCGK

SEQ ID NO: 40763 - protein, 8 aa, Artificial Sequence
  Peptide Derived from Human Papillomavirus
LAVFKDTY

SEQ ID NO: 40764 - protein, 11 aa, Artificial Sequence
  Peptide Derived from Human Papillomavirus
LDDATTTCWTY

SEQ ID NO: 40765 - protein, 10 aa, Artificial Sequence
  Peptide Derived from Human Papillomavirus
LDGNPISIDR

SEQ ID NO: 40766 - protein, 11 aa, Artificial Sequence
  Peptide Derived from Human Papillomavirus
LDGNPISIDRK

SEQ ID NO: 40767 - protein, 8 aa, Artificial Sequence
  Peptide Derived from Human Papillomavirus
LFHAQEVH

SEQ ID NO: 40768 - protein, 9 aa, Artificial Sequence
  Peptide Derived from Human Papillomavirus
LFTISDSGY

SEQ ID NO: 40769 - protein, 9 aa, Artificial Sequence
  Peptide Derived from Human Papillomavirus
LGALKSFLK

SEQ ID NO: 40770 - protein, 8 aa, Artificial Sequence
  Peptide Derived from Human Papillomavirus
LILALLRY

SEQ ID NO: 40771 - protein, 9 aa, Artificial Sequence
  Peptide Derived from Human Papillomavirus
LILALLRYK

SEQ ID NO: 40772 - protein, 8 aa, Artificial Sequence
  Peptide Derived from Human Papillomavirus
LIQPFILY

SEQ ID NO: 40773 - protein, 10 aa, Artificial Sequence
  Peptide Derived from Human Papillomavirus
LIQPFILYAH

SEQ ID NO: 40774 - protein, 8 aa, Artificial Sequence
  Peptide Derived from Human Papillomavirus
LIQPPKLR

SEQ ID NO: 40775 - protein, 8 aa, Artificial Sequence
  Peptide Derived from Human Papillomavirus
LLRYKCGK

SEQ ID NO: 40776 - protein, 10 aa, Artificial Sequence
  Peptide Derived from Human Papillomavirus
LLRYKCGKSR

SEQ ID NO: 40777 - protein, 10 aa, Artificial Sequence
  Peptide Derived from Human Papillomavirus
LLTTNIHPAK

SEQ ID NO: 40778 - protein, 9 aa, Artificial Sequence
  Peptide Derived from Human Papillomavirus
LNSGQKKAK

SEQ ID NO: 40779 - protein, 10 aa, Artificial Sequence
  Peptide Derived from Human Papillomavirus
LNSGQKKAKR

SEQ ID NO: 40780 - protein, 11 aa, Artificial Sequence
  Peptide Derived from Human Papillomavirus
LNSGQKKAKRR

SEQ ID NO: 40781 - protein, 8 aa, Artificial Sequence
  Peptide Derived from Human Papillomavirus
LSFTDLVR

SEQ ID NO: 40782 - protein, 11 aa, Artificial Sequence
  Peptide Derived from Human Papillomavirus
LSFTDLVRNFK

SEQ ID NO: 40783 - protein, 11 aa, Artificial Sequence
  Peptide Derived from Human Papillomavirus
LTDESDMAFEY

SEQ ID NO: 40784 - protein, 9 aa, Artificial Sequence
  Peptide Derived from Human Papillomavirus
LTTNIHPAK

SEQ ID NO: 40785 - protein, 11 aa, Artificial Sequence
  Peptide Derived from Human Papillomavirus
LVFCGPANTGK

SEQ ID NO: 40786 - protein, 9 aa, Artificial Sequence
  Peptide Derived from Human Papillomavirus
LVRNFKSDK

SEQ ID NO: 40787 - protein, 10 aa, Artificial Sequence
  Peptide Derived from Human Papillomavirus
MCKHYRRAQK

SEQ ID NO: 40788 - protein, 11 aa, Artificial Sequence
  Peptide Derived from Human Papillomavirus
MCKHYRRAQKR

SEQ ID NO: 40789 - protein, 10 aa, Artificial Sequence
  Peptide Derived from Human Papillomavirus
MGDTPEWIQR

SEQ ID NO: 40790 - protein, 9 aa, Artificial Sequence
  Peptide Derived from Human Papillomavirus
MLAVFKDTY

SEQ ID NO: 40791 - protein, 9 aa, Artificial Sequence
  Peptide Derived from Human Papillomavirus
MLIQPPKLR

SEQ ID NO: 40792 - protein, 8 aa, Artificial Sequence
  Peptide Derived from Human Papillomavirus
MNMSQWIR

SEQ ID NO: 40793 - protein, 10 aa, Artificial Sequence
  Peptide Derived from Human Papillomavirus
MNMSQWIRFR

SEQ ID NO: 40794 - protein, 8 aa, Artificial Sequence
  Peptide Derived from Human Papillomavirus
MSQWIRFR

SEQ ID NO: 40795 - protein, 11 aa, Artificial Sequence
  Peptide Derived from Human Papillomavirus
MSQWIRFRCSK

SEQ ID NO: 40796 - protein, 8 aa, Artificial Sequence
  Peptide Derived from Human Papillomavirus
NCQAKYLK

SEQ ID NO: 40797 - protein, 10 aa, Artificial Sequence
  Peptide Derived from Human Papillomavirus
NDAQVLHVLK

SEQ ID NO: 40798 - protein, 11 aa, Artificial Sequence
  Peptide Derived from Human Papillomavirus
NDAQVLHVLKR

SEQ ID NO: 40799 - protein, 11 aa, Artificial Sequence
  Peptide Derived from Human Papillomavirus
NDKNWKCFFER

SEQ ID NO: 40800 - protein, 11 aa, Artificial Sequence
  Peptide Derived from Human Papillomavirus
NGNPVYEINDK

SEQ ID NO: 40801 - protein, 9 aa, Artificial Sequence
  Peptide Derived from Human Papillomavirus
NIHPAKDNR

SEQ ID NO: 40802 - protein, 9 aa, Artificial Sequence
  Peptide Derived from Human Papillomavirus
NMSQWIRFR

SEQ ID NO: 40803 - protein, 8 aa, Artificial Sequence
  Peptide Derived from Human Papillomavirus
NSGQKKAK

SEQ ID NO: 40804 - protein, 9 aa, Artificial Sequence
  Peptide Derived from Human Papillomavirus
NSGQKKAKR

SEQ ID NO: 40805 - protein, 10 aa, Artificial Sequence
  Peptide Derived from Human Papillomavirus
NSGQKKAKRR

SEQ ID NO: 40806 - protein, 9 aa, Artificial Sequence
  Peptide Derived from Human Papillomavirus
NSNAAAFLK

SEQ ID NO: 40807 - protein, 9 aa, Artificial Sequence
  Peptide Derived from Human Papillomavirus
PAKDNRWPY

SEQ ID NO: 40808 - protein, 8 aa, Artificial Sequence
  Peptide Derived from Human Papillomavirus
PANTGKSY

SEQ ID NO: 40809 - protein, 10 aa, Artificial Sequence
  Peptide Derived from Human Papillomavirus
PFDKNGNPVY

SEQ ID NO: 40810 - protein, 8 aa, Artificial Sequence
  Peptide Derived from Human Papillomavirus
PFGTFKLR

SEQ ID NO: 40811 - protein, 9 aa, Artificial Sequence
  Peptide Derived from Human Papillomavirus
PILLTTNIH

SEQ ID NO: 40812 - protein, 8 aa, Artificial Sequence
  Peptide Derived from Human Papillomavirus
PISIDRKH

SEQ ID NO: 40813 - protein, 9 aa, Artificial Sequence
  Peptide Derived from Human Papillomavirus
PISIDRKHK

SEQ ID NO: 40814 - protein, 8 aa, Artificial Sequence
  Peptide Derived from Human Papillomavirus
PIVQFLRY

SEQ ID NO: 40815 - protein, 8 aa, Artificial Sequence
  Peptide Derived from Human Papillomavirus
PNAFPFDK

SEQ ID NO: 40816 - protein, 8 aa, Artificial Sequence
  Peptide Derived from Human Papillomavirus
PTIAEGFK

SEQ ID NO: 40817 - protein, 8 aa, Artificial Sequence
  Peptide Derived from Human Papillomavirus
PVYEINDK

SEQ ID NO: 40818 - protein, 11 aa, Artificial Sequence
  Peptide Derived from Human Papillomavirus
PVYEINDKNWK

SEQ ID NO: 40819 - protein, 10 aa, Artificial Sequence
  Peptide Derived from Human Papillomavirus
QALFHAQEVH

SEQ ID NO: 40820 - protein, 8 aa, Artificial Sequence
  Peptide Derived from Human Papillomavirus
QCTIAQLK

SEQ ID NO: 40821 - protein, 9 aa, Artificial Sequence
  Peptide Derived from Human Papillomavirus
QGAMLAVFK

SEQ ID NO: 40822 - protein, 10 aa, Artificial Sequence
  Peptide Derived from Human Papillomavirus
QIQVTTNGEH

SEQ ID NO: 40823 - protein, 11 aa, Artificial Sequence
  Peptide Derived from Human Papillomavirus
QLKDLLKVNNK

SEQ ID NO: 40824 - protein, 9 aa, Artificial Sequence
  Peptide Derived from Human Papillomavirus
QMNMSQWIR

SEQ ID NO: 40825 - protein, 11 aa, Artificial Sequence
  Peptide Derived from Human Papillomavirus
QMNMSQWIRFR

SEQ ID NO: 40826 - protein, 8 aa, Artificial Sequence
  Peptide Derived from Human Papillomavirus
QVLHVLKR

SEQ ID NO: 40827 - protein, 9 aa, Artificial Sequence
  Peptide Derived from Human Papillomavirus
QVLHVLKRK

SEQ ID NO: 40828 - protein, 8 aa, Artificial Sequence
  Peptide Derived from Human Papillomavirus
QVTTNGEH

SEQ ID NO: 40829 - protein, 11 aa, Artificial Sequence
  Peptide Derived from Human Papillomavirus
RLEVDTELSPR

SEQ ID NO: 40830 - protein, 10 aa, Artificial Sequence
  Peptide Derived from Human Papillomavirus
RLFTISDSGY

SEQ ID NO: 40831 - protein, 8 aa, Artificial Sequence
  Peptide Derived from Human Papillomavirus
RSSVAALY

SEQ ID NO: 40832 - protein, 10 aa, Artificial Sequence
  Peptide Derived from Human Papillomavirus
RSSVAALYWY

SEQ ID NO: 40833 - protein, 11 aa, Artificial Sequence
  Peptide Derived from Human Papillomavirus
RSSVAALYWYR

SEQ ID NO: 40834 - protein, 9 aa, Artificial Sequence
  Peptide Derived from Human Papillomavirus
RTWSRLDLH

SEQ ID NO: 40835 - protein, 8 aa, Artificial Sequence
  Peptide Derived from Human Papillomavirus
SFLKGTPK

SEQ ID NO: 40836 - protein, 9 aa, Artificial Sequence
  Peptide Derived from Human Papillomavirus
SFLKGTPKK

SEQ ID NO: 40837 - protein, 10 aa, Artificial Sequence
  Peptide Derived from Human Papillomavirus
SFTDLVRNFK

SEQ ID NO: 40838 - protein, 8 aa, Artificial Sequence
  Peptide Derived from Human Papillomavirus
SFVNSTSH

SEQ ID NO: 40839 - protein, 8 aa, Artificial Sequence
  Peptide Derived from Human Papillomavirus
SGQKKAKR

SEQ ID NO: 40840 - protein, 9 aa, Artificial Sequence
  Peptide Derived from Human Papillomavirus
SGQKKAKRR

SEQ ID NO: 40841 - protein, 8 aa, Artificial Sequence
  Peptide Derived from Human Papillomavirus
SLNSGQKK

SEQ ID NO: 40842 - protein, 10 aa, Artificial Sequence
  Peptide Derived from Human Papillomavirus
SLNSGQKKAK

SEQ ID NO: 40843 - protein, 11 aa, Artificial Sequence
  Peptide Derived from Human Papillomavirus
SLNSGQKKAKR

SEQ ID NO: 40844 - protein, 8 aa, Artificial Sequence
  Peptide Derived from Human Papillomavirus
SNAAAFLK

SEQ ID NO: 40845 - protein, 9 aa, Artificial Sequence
  Peptide Derived from Human Papillomavirus
SNCQAKYLK

SEQ ID NO: 40846 - protein, 10 aa, Artificial Sequence
  Peptide Derived from Human Papillomavirus
SNSNAAAFLK

SEQ ID NO: 40847 - protein, 9 aa, Artificial Sequence
  Peptide Derived from Human Papillomavirus
SSVAALYWY

SEQ ID NO: 40848 - protein, 10 aa, Artificial Sequence
  Peptide Derived from Human Papillomavirus
SSVAALYWYR

SEQ ID NO: 40849 - protein, 10 aa, Artificial Sequence
  Peptide Derived from Human Papillomavirus
STENSPLGER

SEQ ID NO: 40850 - protein, 8 aa, Artificial Sequence
  Peptide Derived from Human Papillomavirus
SVAALYWY

SEQ ID NO: 40851 - protein, 9 aa, Artificial Sequence
  Peptide Derived from Human Papillomavirus
SVAALYWYR

SEQ ID NO: 40852 - protein, 9 aa, Artificial Sequence
  Peptide Derived from Human Papillomavirus
TCMLIQPPK

SEQ ID NO: 40853 - protein, 11 aa, Artificial Sequence
  Peptide Derived from Human Papillomavirus
TCMLIQPPKLR

SEQ ID NO: 40854 - protein, 9 aa, Artificial Sequence
  Peptide Derived from Human Papillomavirus
TCWTYFDTY

SEQ ID NO: 40855 - protein, 11 aa, Artificial Sequence
  Peptide Derived from Human Papillomavirus
TCWTYFDTYMR

SEQ ID NO: 40856 - protein, 10 aa, Artificial Sequence
  Peptide Derived from Human Papillomavirus
TDESDMAFEY

SEQ ID NO: 40857 - protein, 8 aa, Artificial Sequence
  Peptide Derived from Human Papillomavirus
TDLVRNFK

SEQ ID NO: 40858 - protein, 11 aa, Artificial Sequence
  Peptide Derived from Human Papillomavirus
TDLVRNFKSDK

SEQ ID NO: 40859 - protein, 10 aa, Artificial Sequence
  Peptide Derived from Human Papillomavirus
TFKLRAGQNH

SEQ ID NO: 40860 - protein, 11 aa, Artificial Sequence
  Peptide Derived from Human Papillomavirus
TFKLRAGQNHR

SEQ ID NO: 40861 - protein, 11 aa, Artificial Sequence
  Peptide Derived from Human Papillomavirus
TFLGALKSFLK

SEQ ID NO: 40862 - protein, 8 aa, Artificial Sequence
  Peptide Derived from Human Papillomavirus
TGCNGWFY

SEQ ID NO: 40863 - protein, 10 aa, Artificial Sequence
  Peptide Derived from Human Papillomavirus
TIAQLKDLLK

SEQ ID NO: 40864 - protein, 9 aa, Artificial Sequence
  Peptide Derived from Human Papillomavirus
TLIQPFILY

SEQ ID NO: 40865 - protein, 11 aa, Artificial Sequence
  Peptide Derived from Human Papillomavirus
TLIQPFILYAH

SEQ ID NO: 40866 - protein, 8 aa, Artificial Sequence
  Peptide Derived from Human Papillomavirus
TMCKHYRR

SEQ ID NO: 40867 - protein, 11 aa, Artificial Sequence
  Peptide Derived from Human Papillomavirus
TMCKHYRRAQK

SEQ ID NO: 40868 - protein, 10 aa, Artificial Sequence
  Peptide Derived from Human Papillomavirus
TNIHPAKDNR

SEQ ID NO: 40869 - protein, 10 aa, Artificial Sequence
  Peptide Derived from Human Papillomavirus
TTCWTYFDTY

SEQ ID NO: 40870 - protein, 8 aa, Artificial Sequence
  Peptide Derived from Human Papillomavirus
TTNIHPAK

SEQ ID NO: 40871 - protein, 11 aa, Artificial Sequence
  Peptide Derived from Human Papillomavirus
TTNIHPAKDNR

SEQ ID NO: 40872 - protein, 11 aa, Artificial Sequence
  Peptide Derived from Human Papillomavirus
TTTCWTYFDTY

SEQ ID NO: 40873 - protein, 11 aa, Artificial Sequence
  Peptide Derived from Human Papillomavirus
TVAKGLSTLLH

SEQ ID NO: 40874 - protein, 8 aa, Artificial Sequence
  Peptide Derived from Human Papillomavirus
VAALYWYR

SEQ ID NO: 40875 - protein, 10 aa, Artificial Sequence
  Peptide Derived from Human Papillomavirus
VAKGLSTLLH

SEQ ID NO: 40876 - protein, 8 aa, Artificial Sequence
  Peptide Derived from Human Papillomavirus
VDTELSPR

SEQ ID NO: 40877 - protein, 10 aa, Artificial Sequence
  Peptide Derived from Human Papillomavirus
VFCGPANTGK

SEQ ID NO: 40878 - protein, 10 aa, Artificial Sequence
  Peptide Derived from Human Papillomavirus
VISFVNSTSH

SEQ ID NO: 40879 - protein, 8 aa, Artificial Sequence
  Peptide Derived from Human Papillomavirus
VLHVLKRK

SEQ ID NO: 40880 - protein, 8 aa, Artificial Sequence
  Peptide Derived from Human Papillomavirus
VLILALLR

SEQ ID NO: 40881 - protein, 9 aa, Artificial Sequence
  Peptide Derived from Human Papillomavirus
VLILALLRY

SEQ ID NO: 40882 - protein, 10 aa, Artificial Sequence
  Peptide Derived from Human Papillomavirus
VLILALLRYK

SEQ ID NO: 40883 - protein, 11 aa, Artificial Sequence
  Peptide Derived from Human Papillomavirus
VMGDTPEWIQR

SEQ ID NO: 40884 - protein, 11 aa, Artificial Sequence
  Peptide Derived from Human Papillomavirus
VNPQCTIAQLK

SEQ ID NO: 40885 - protein, 10 aa, Artificial Sequence
  Peptide Derived from Human Papillomavirus
VNPTIAEGFK

SEQ ID NO: 40886 - protein, 10 aa, Artificial Sequence
  Peptide Derived from Human Papillomavirus
WFYVQAIVDK

SEQ ID NO: 40887 - protein, 11 aa, Artificial Sequence
  Peptide Derived from Human Papillomavirus
WFYVQAIVDKK

SEQ ID NO: 40888 - protein, 10 aa, Artificial Sequence
  Peptide Derived from Human Papillomavirus
WGVLILALLR

SEQ ID NO: 40889 - protein, 11 aa, Artificial Sequence
  Peptide Derived from Human Papillomavirus
WGVLILALLRY

SEQ ID NO: 40890 - protein, 10 aa, Artificial Sequence
  Peptide Derived from Human Papillomavirus
WIQRLTIIQH

SEQ ID NO: 40891 - protein, 8 aa, Artificial Sequence
  Peptide Derived from Human Papillomavirus
WIRFRCSK

SEQ ID NO: 40892 - protein, 9 aa, Artificial Sequence
  Peptide Derived from Human Papillomavirus
WLEPLTDTK

SEQ ID NO: 40893 - protein, 9 aa, Artificial Sequence
  Peptide Derived from Human Papillomavirus
WTYFDTYMR

SEQ ID NO: 40894 - protein, 10 aa, Artificial Sequence
  Peptide Derived from Human Papillomavirus
YAHIQCLDCK

SEQ ID NO: 40895 - protein, 8 aa, Artificial Sequence
  Peptide Derived from Human Papillomavirus
YFGMSFIH

SEQ ID NO: 40896 - protein, 10 aa, Artificial Sequence
  Peptide Derived from Human Papillomavirus
YGLSFTDLVR

SEQ ID NO: 40897 - protein, 10 aa, Artificial Sequence
  Peptide Derived from Human Papillomavirus
YLKDCATMCK

SEQ ID NO: 40898 - protein, 11 aa, Artificial Sequence
  Peptide Derived from Human Papillomavirus
YLKDCATMCKH

SEQ ID NO: 40899 - protein, 8 aa, Artificial Sequence
  Peptide Derived from Human Papillomavirus
YVQAIVDK

SEQ ID NO: 40900 - protein, 9 aa, Artificial Sequence
  Peptide Derived from Human Papillomavirus
YVQAIVDKK

SEQ ID NO: 40901 - protein, 9 aa, Artificial Sequence
  Peptide Derived from Human Papillomavirus
AATPTGNNK

SEQ ID NO: 40902 - protein, 10 aa, Artificial Sequence
  Peptide Derived from Human Papillomavirus
AATPTGNNKR

SEQ ID NO: 40903 - protein, 11 aa, Artificial Sequence
  Peptide Derived from Human Papillomavirus
AATPTGNNKRR

SEQ ID NO: 40904 - protein, 9 aa, Artificial Sequence
  Peptide Derived from Human Papillomavirus
AIFFAAREH

SEQ ID NO: 40905 - protein, 9 aa, Artificial Sequence
  Peptide Derived from Human Papillomavirus
ALQGLAQSR

SEQ ID NO: 40906 - protein, 10 aa, Artificial Sequence
  Peptide Derived from Human Papillomavirus
ALQGLAQSRY

SEQ ID NO: 40907 - protein, 11 aa, Artificial Sequence
  Peptide Derived from Human Papillomavirus
ALQGLAQSRYK

SEQ ID NO: 40908 - protein, 10 aa, Artificial Sequence
  Peptide Derived from Human Papillomavirus
ATCVSHRGLY

SEQ ID NO: 40909 - protein, 11 aa, Artificial Sequence
  Peptide Derived from Human Papillomavirus
ATCVSHRGLYY

SEQ ID NO: 40910 - protein, 8 aa, Artificial Sequence
  Peptide Derived from Human Papillomavirus
ATPTGNNK

SEQ ID NO: 40911 - protein, 9 aa, Artificial Sequence
  Peptide Derived from Human Papillomavirus
ATPTGNNKR

SEQ ID NO: 40912 - protein, 10 aa, Artificial Sequence
  Peptide Derived from Human Papillomavirus
ATPTGNNKRR

SEQ ID NO: 40913 - protein, 11 aa, Artificial Sequence
  Peptide Derived from Human Papillomavirus
ATPTGNNKRRK

SEQ ID NO: 40914 - protein, 10 aa, Artificial Sequence
  Peptide Derived from Human Papillomavirus
ATQLVKQLQH

SEQ ID NO: 40915 - protein, 8 aa, Artificial Sequence
  Peptide Derived from Human Papillomavirus
CGLAEKQH

SEQ ID NO: 40916 - protein, 8 aa, Artificial Sequence
  Peptide Derived from Human Papillomavirus
CLRYRLRK

SEQ ID NO: 40917 - protein, 9 aa, Artificial Sequence
  Peptide Derived from Human Papillomavirus
CLRYRLRKH

SEQ ID NO: 40918 - protein, 11 aa, Artificial Sequence
  Peptide Derived from Human Papillomavirus
CMTYVAWDSVY

SEQ ID NO: 40919 - protein, 10 aa, Artificial Sequence
  Peptide Derived from Human Papillomavirus
CSGNTTPIIH

SEQ ID NO: 40920 - protein, 9 aa, Artificial Sequence
  Peptide Derived from Human Papillomavirus
CVQDKIIDH

SEQ ID NO: 40921 - protein, 10 aa, Artificial Sequence
  Peptide Derived from Human Papillomavirus
CVQDKIIDHY

SEQ ID NO: 40922 - protein, 8 aa, Artificial Sequence
  Peptide Derived from Human Papillomavirus
CVSHRGLY

SEQ ID NO: 40923 - protein, 9 aa, Artificial Sequence
  Peptide Derived from Human Papillomavirus
CVSHRGLYY

SEQ ID NO: 40924 - protein, 11 aa, Artificial Sequence
  Peptide Derived from Human Papillomavirus
CVSHRGLYYVK

SEQ ID NO: 40925 - protein, 11 aa, Artificial Sequence
  Peptide Derived from Human Papillomavirus
DDTVSATQLVK

SEQ ID NO: 40926 - protein, 10 aa, Artificial Sequence
  Peptide Derived from Human Papillomavirus
DGNKDNCMTY

SEQ ID NO: 40927 - protein, 8 aa, Artificial Sequence
  Peptide Derived from Human Papillomavirus
DIDSQIQY

SEQ ID NO: 40928 - protein, 11 aa, Artificial Sequence
  Peptide Derived from Human Papillomavirus
DSKDIDSQIQY

SEQ ID NO: 40929 - protein, 11 aa, Artificial Sequence
  Peptide Derived from Human Papillomavirus
DSQIQYWQLIR

SEQ ID NO: 40930 - protein, 9 aa, Artificial Sequence
  Peptide Derived from Human Papillomavirus
DSVQILVGY

SEQ ID NO: 40931 - protein, 10 aa, Artificial Sequence
  Peptide Derived from Human Papillomavirus
DTVSATQLVK

SEQ ID NO: 40932 - protein, 8 aa, Artificial Sequence
  Peptide Derived from Human Papillomavirus
EFKSECEK

SEQ ID NO: 40933 - protein, 9 aa, Artificial Sequence
  Peptide Derived from Human Papillomavirus
EFKSECEKY

SEQ ID NO: 40934 - protein, 11 aa, Artificial Sequence
  Peptide Derived from Human Papillomavirus
EGYNTFYIEFK

SEQ ID NO: 40935 - protein, 9 aa, Artificial Sequence
  Peptide Derived from Human Papillomavirus
ELWNTEPTH

SEQ ID NO: 40936 - protein, 9 aa, Artificial Sequence
  Peptide Derived from Human Papillomavirus
ENAIFFAAR

SEQ ID NO: 40937 - protein, 11 aa, Artificial Sequence
  Peptide Derived from Human Papillomavirus
ENAIFFAAREH

SEQ ID NO: 40938 - protein, 11 aa, Artificial Sequence
  Peptide Derived from Human Papillomavirus
FDGNKDNCMTY

SEQ ID NO: 40939 - protein, 10 aa, Artificial Sequence
  Peptide Derived from Human Papillomavirus
GAATPTGNNK

SEQ ID NO: 40940 - protein, 11 aa, Artificial Sequence
  Peptide Derived from Human Papillomavirus
GAATPTGNNKR

SEQ ID NO: 40941 - protein, 10 aa, Artificial Sequence
  Peptide Derived from Human Papillomavirus
GDRNSLKCLR

SEQ ID NO: 40942 - protein, 11 aa, Artificial Sequence
  Peptide Derived from Human Papillomavirus
GDRNSLKCLRY

SEQ ID NO: 40943 - protein, 8 aa, Artificial Sequence
  Peptide Derived from Human Papillomavirus
GGQTVQVY

SEQ ID NO: 40944 - protein, 8 aa, Artificial Sequence
  Peptide Derived from Human Papillomavirus
GILTVTYH

SEQ ID NO: 40945 - protein, 8 aa, Artificial Sequence
  Peptide Derived from Human Papillomavirus
GLAQSRYK

SEQ ID NO: 40946 - protein, 9 aa, Artificial Sequence
  Peptide Derived from Human Papillomavirus
GLYYVKEGY

SEQ ID NO: 40947 - protein, 9 aa, Artificial Sequence
  Peptide Derived from Human Papillomavirus
GNKDNCMTY

SEQ ID NO: 40948 - protein, 9 aa, Artificial Sequence
  Peptide Derived from Human Papillomavirus
GNTGTWEVH

SEQ ID NO: 40949 - protein, 8 aa, Artificial Sequence
  Peptide Derived from Human Papillomavirus
GNTTPIIH

SEQ ID NO: 40950 - protein, 10 aa, Artificial Sequence
  Peptide Derived from Human Papillomavirus
GNTTPIIHLK

SEQ ID NO: 40951 - protein, 9 aa, Artificial Sequence
  Peptide Derived from Human Papillomavirus
HCGLAEKQH

SEQ ID NO: 40952 - protein, 8 aa, Artificial Sequence
  Peptide Derived from Human Papillomavirus
HGIQTLNH

SEQ ID NO: 40953 - protein, 10 aa, Artificial Sequence
  Peptide Derived from Human Papillomavirus
HLKGDRNSLK

SEQ ID NO: 40954 - protein, 8 aa, Artificial Sequence
  Peptide Derived from Human Papillomavirus
HSETQRTK

SEQ ID NO: 40955 - protein, 9 aa, Artificial Sequence
  Peptide Derived from Human Papillomavirus
IDHYENDSK

SEQ ID NO: 40956 - protein, 8 aa, Artificial Sequence
  Peptide Derived from Human Papillomavirus
IFFAAREH

SEQ ID NO: 40957 - protein, 10 aa, Artificial Sequence
  Peptide Derived from Human Papillomavirus
IIDHYENDSK

SEQ ID NO: 40958 - protein, 8 aa, Artificial Sequence
  Peptide Derived from Human Papillomavirus
IIHLKGDR

SEQ ID NO: 40959 - protein, 8 aa, Artificial Sequence
  Peptide Derived from Human Papillomavirus
ISKSKAHK

SEQ ID NO: 40960 - protein, 8 aa, Artificial Sequence
  Peptide Derived from Human Papillomavirus
KCLRYRLR

SEQ ID NO: 40961 - protein, 9 aa, Artificial Sequence
  Peptide Derived from Human Papillomavirus
KCLRYRLRK

SEQ ID NO: 40962 - protein, 10 aa, Artificial Sequence
  Peptide Derived from Human Papillomavirus
KCLRYRLRKH

SEQ ID NO: 40963 - protein, 9 aa, Artificial Sequence
  Peptide Derived from Human Papillomavirus
KDIDSQIQY

SEQ ID NO: 40964 - protein, 8 aa, Artificial Sequence
  Peptide Derived from Human Papillomavirus
KGDRNSLK

SEQ ID NO: 40965 - protein, 11 aa, Artificial Sequence
  Peptide Derived from Human Papillomavirus
KGDRNSLKCLR

SEQ ID NO: 40966 - protein, 9 aa, Artificial Sequence
  Peptide Derived from Human Papillomavirus
KGGQTVQVY

SEQ ID NO: 40967 - protein, 11 aa, Artificial Sequence
  Peptide Derived from Human Papillomavirus
KIIDHYENDSK

SEQ ID NO: 40968 - protein, 8 aa, Artificial Sequence
  Peptide Derived from Human Papillomavirus
KTATCVSH

SEQ ID NO: 40969 - protein, 9 aa, Artificial Sequence
  Peptide Derived from Human Papillomavirus
KTATCVSHR

SEQ ID NO: 40970 - protein, 9 aa, Artificial Sequence
  Peptide Derived from Human Papillomavirus
KTGILTVTY

SEQ ID NO: 40971 - protein, 10 aa, Artificial Sequence
  Peptide Derived from Human Papillomavirus
KTGILTVTYH

SEQ ID NO: 40972 - protein, 11 aa, Artificial Sequence
  Peptide Derived from Human Papillomavirus
KTYGQTSAATR

SEQ ID NO: 40973 - protein, 11 aa, Artificial Sequence
  Peptide Derived from Human Papillomavirus
LCSGNTTPIIH

SEQ ID NO: 40974 - protein, 11 aa, Artificial Sequence
  Peptide Derived from Human Papillomavirus
LGAATPTGNNK

SEQ ID NO: 40975 - protein, 9 aa, Artificial Sequence
  Peptide Derived from Human Papillomavirus
LNHQVVPAY

SEQ ID NO: 40976 - protein, 11 aa, Artificial Sequence
  Peptide Derived from Human Papillomavirus
LSCVQDKIIDH

SEQ ID NO: 40977 - protein, 11 aa, Artificial Sequence
  Peptide Derived from Human Papillomavirus
LSERLSCVQDK

SEQ ID NO: 40978 - protein, 11 aa, Artificial Sequence
  Peptide Derived from Human Papillomavirus
LTVTYHSETQR

SEQ ID NO: 40979 - protein, 10 aa, Artificial Sequence
  Peptide Derived from Human Papillomavirus
MALQGLAQSR

SEQ ID NO: 40980 - protein, 11 aa, Artificial Sequence
  Peptide Derived from Human Papillomavirus
MALQGLAQSRY

SEQ ID NO: 40981 - protein, 9 aa, Artificial Sequence
  Peptide Derived from Human Papillomavirus
MTDAGTWDK

SEQ ID NO: 40982 - protein, 10 aa, Artificial Sequence
  Peptide Derived from Human Papillomavirus
MTYVAWDSVY

SEQ ID NO: 40983 - protein, 11 aa, Artificial Sequence
  Peptide Derived from Human Papillomavirus
MTYVAWDSVYY

SEQ ID NO: 40984 - protein, 8 aa, Artificial Sequence
  Peptide Derived from Human Papillomavirus
NAIFFAAR

SEQ ID NO: 40985 - protein, 10 aa, Artificial Sequence
  Peptide Derived from Human Papillomavirus
NAIFFAAREH

SEQ ID NO: 40986 - protein, 8 aa, Artificial Sequence
  Peptide Derived from Human Papillomavirus
NISKSKAH

SEQ ID NO: 40987 - protein, 9 aa, Artificial Sequence
  Peptide Derived from Human Papillomavirus
NISKSKAHK

SEQ ID NO: 40988 - protein, 8 aa, Artificial Sequence
  Peptide Derived from Human Papillomavirus
NSLKCLRY

SEQ ID NO: 40989 - protein, 9 aa, Artificial Sequence
  Peptide Derived from Human Papillomavirus
NSLKCLRYR

SEQ ID NO: 40990 - protein, 11 aa, Artificial Sequence
  Peptide Derived from Human Papillomavirus
NSLKCLRYRLR

SEQ ID NO: 40991 - protein, 9 aa, Artificial Sequence
  Peptide Derived from Human Papillomavirus
NTEPTHCFK

SEQ ID NO: 40992 - protein, 10 aa, Artificial Sequence
  Peptide Derived from Human Papillomavirus
NTEPTHCFKK

SEQ ID NO: 40993 - protein, 8 aa, Artificial Sequence
  Peptide Derived from Human Papillomavirus
NTFYIEFK

SEQ ID NO: 40994 - protein, 8 aa, Artificial Sequence
  Peptide Derived from Human Papillomavirus
NTGTWEVH

SEQ ID NO: 40995 - protein, 9 aa, Artificial Sequence
  Peptide Derived from Human Papillomavirus
NTTPIIHLK

SEQ ID NO: 40996 - protein, 9 aa, Artificial Sequence
  Peptide Derived from Human Papillomavirus
PAYNISKSK

SEQ ID NO: 40997 - protein, 11 aa, Artificial Sequence
  Peptide Derived from Human Papillomavirus
PAYNISKSKAH

SEQ ID NO: 40998 - protein, 10 aa, Artificial Sequence
  Peptide Derived from Human Papillomavirus
PDSVQILVGY

SEQ ID NO: 40999 - protein, 9 aa, Artificial Sequence
  Peptide Derived from Human Papillomavirus
PGHCGLAEK

SEQ ID NO: 41000 - protein, 11 aa, Artificial Sequence
  Peptide Derived from Human Papillomavirus
PGHCGLAEKQH

SEQ ID NO: 41001 - protein, 9 aa, Artificial Sequence
  Peptide Derived from Human Papillomavirus
PIIHLKGDR

SEQ ID NO: 41002 - protein, 8 aa, Artificial Sequence
  Peptide Derived from Human Papillomavirus
PTGNNKRR

SEQ ID NO: 41003 - protein, 9 aa, Artificial Sequence
  Peptide Derived from Human Papillomavirus
PTGNNKRRK

SEQ ID NO: 41004 - protein, 8 aa, Artificial Sequence
  Peptide Derived from Human Papillomavirus
QDKIIDHY

SEQ ID NO: 41005 - protein, 8 aa, Artificial Sequence
  Peptide Derived from Human Papillomavirus
QGLAQSRY

SEQ ID NO: 41006 - protein, 9 aa, Artificial Sequence
  Peptide Derived from Human Papillomavirus
QGLAQSRYK

SEQ ID NO: 41007 - protein, 9 aa, Artificial Sequence
  Peptide Derived from Human Papillomavirus
QIQYWQLIR

SEQ ID NO: 41008 - protein, 9 aa, Artificial Sequence
  Peptide Derived from Human Papillomavirus
QLQHTPSPY

SEQ ID NO: 41009 - protein, 8 aa, Artificial Sequence
  Peptide Derived from Human Papillomavirus
QLVKQLQH

SEQ ID NO: 41010 - protein, 11 aa, Artificial Sequence
  Peptide Derived from Human Papillomavirus
QMALQGLAQSR

SEQ ID NO: 41011 - protein, 11 aa, Artificial Sequence
  Peptide Derived from Human Papillomavirus
QTLNHQVVPAY

SEQ ID NO: 41012 - protein, 10 aa, Artificial Sequence
  Peptide Derived from Human Papillomavirus
QTPKETLSER

SEQ ID NO: 41013 - protein, 10 aa, Artificial Sequence
  Peptide Derived from Human Papillomavirus
QTSAATRPGH

SEQ ID NO: 41014 - protein, 11 aa, Artificial Sequence
  Peptide Derived from Human Papillomavirus
QTVQVYFDGNK

SEQ ID NO: 41015 - protein, 10 aa, Artificial Sequence
  Peptide Derived from Human Papillomavirus
QVVPAYNISK

SEQ ID NO: 41016 - protein, 8 aa, Artificial Sequence
  Peptide Derived from Human Papillomavirus
QVYFDGNK

SEQ ID NO: 41017 - protein, 8 aa, Artificial Sequence
  Peptide Derived from Human Papillomavirus
RDISSTWH

SEQ ID NO: 41018 - protein, 10 aa, Artificial Sequence
  Peptide Derived from Human Papillomavirus
RGLYYVKEGY

SEQ ID NO: 41019 - protein, 8 aa, Artificial Sequence
  Peptide Derived from Human Papillomavirus
RLRKHSDH

SEQ ID NO: 41020 - protein, 9 aa, Artificial Sequence
  Peptide Derived from Human Papillomavirus
RLRKHSDHY

SEQ ID NO: 41021 - protein, 10 aa, Artificial Sequence
  Peptide Derived from Human Papillomavirus
RLRKHSDHYR

SEQ ID NO: 41022 - protein, 8 aa, Artificial Sequence
  Peptide Derived from Human Papillomavirus
RLSCVQDK

SEQ ID NO: 41023 - protein, 8 aa, Artificial Sequence
  Peptide Derived from Human Papillomavirus
RNSLKCLR

SEQ ID NO: 41024 - protein, 9 aa, Artificial Sequence
  Peptide Derived from Human Papillomavirus
RNSLKCLRY

SEQ ID NO: 41025 - protein, 10 aa, Artificial Sequence
  Peptide Derived from Human Papillomavirus
RNSLKCLRYR

SEQ ID NO: 41026 - protein, 8 aa, Artificial Sequence
  Peptide Derived from Human Papillomavirus
SAATRPGH

SEQ ID NO: 41027 - protein, 11 aa, Artificial Sequence
  Peptide Derived from Human Papillomavirus
SATQLVKQLQH

SEQ ID NO: 41028 - protein, 10 aa, Artificial Sequence
  Peptide Derived from Human Papillomavirus
SCVQDKIIDH

SEQ ID NO: 41029 - protein, 11 aa, Artificial Sequence
  Peptide Derived from Human Papillomavirus
SCVQDKIIDHY

SEQ ID NO: 41030 - protein, 9 aa, Artificial Sequence
  Peptide Derived from Human Papillomavirus
SGNTTPIIH

SEQ ID NO: 41031 - protein, 11 aa, Artificial Sequence
  Peptide Derived from Human Papillomavirus
SGNTTPIIHLK

SEQ ID NO: 41032 - protein, 8 aa, Artificial Sequence
  Peptide Derived from Human Papillomavirus
SLKCLRYR

SEQ ID NO: 41033 - protein, 10 aa, Artificial Sequence
  Peptide Derived from Human Papillomavirus
SLKCLRYRLR

SEQ ID NO: 41034 - protein, 11 aa, Artificial Sequence
  Peptide Derived from Human Papillomavirus
SLKCLRYRLRK

SEQ ID NO: 41035 - protein, 10 aa, Artificial Sequence
  Peptide Derived from Human Papillomavirus
SSTVSVGTAK

SEQ ID NO: 41036 - protein, 9 aa, Artificial Sequence
  Peptide Derived from Human Papillomavirus
STVSVGTAK

SEQ ID NO: 41037 - protein, 11 aa, Artificial Sequence
  Peptide Derived from Human Papillomavirus
STVSVGTAKTY

SEQ ID NO: 41038 - protein, 8 aa, Artificial Sequence
  Peptide Derived from Human Papillomavirus
SVGTAKTY

SEQ ID NO: 41039 - protein, 8 aa, Artificial Sequence
  Peptide Derived from Human Papillomavirus
SVQILVGY

SEQ ID NO: 41040 - protein, 8 aa, Artificial Sequence
  Peptide Derived from Human Papillomavirus
TATCVSHR

SEQ ID NO: 41041 - protein, 11 aa, Artificial Sequence
  Peptide Derived from Human Papillomavirus
TATCVSHRGLY

SEQ ID NO: 41042 - protein, 9 aa, Artificial Sequence
  Peptide Derived from Human Papillomavirus
TCVSHRGLY

SEQ ID NO: 41043 - protein, 10 aa, Artificial Sequence
  Peptide Derived from Human Papillomavirus
TCVSHRGLYY

SEQ ID NO: 41044 - protein, 8 aa, Artificial Sequence
  Peptide Derived from Human Papillomavirus
TDAGTWDK

SEQ ID NO: 41045 - protein, 8 aa, Artificial Sequence
  Peptide Derived from Human Papillomavirus
TGILTVTY

SEQ ID NO: 41046 - protein, 9 aa, Artificial Sequence
  Peptide Derived from Human Papillomavirus
TGILTVTYH

SEQ ID NO: 41047 - protein, 8 aa, Artificial Sequence
  Peptide Derived from Human Papillomavirus
TGNNKRRK

SEQ ID NO: 41048 - protein, 10 aa, Artificial Sequence
  Peptide Derived from Human Papillomavirus
TLNHQVVPAY

SEQ ID NO: 41049 - protein, 9 aa, Artificial Sequence
  Peptide Derived from Human Papillomavirus
TSAATRPGH

SEQ ID NO: 41050 - protein, 8 aa, Artificial Sequence
  Peptide Derived from Human Papillomavirus
TTPIIHLK

SEQ ID NO: 41051 - protein, 11 aa, Artificial Sequence
  Peptide Derived from Human Papillomavirus
TTPIIHLKGDR

SEQ ID NO: 41052 - protein, 10 aa, Artificial Sequence
  Peptide Derived from Human Papillomavirus
TVQVYFDGNK

SEQ ID NO: 41053 - protein, 9 aa, Artificial Sequence
  Peptide Derived from Human Papillomavirus
TVSATQLVK

SEQ ID NO: 41054 - protein, 8 aa, Artificial Sequence
  Peptide Derived from Human Papillomavirus
TVSVGTAK

SEQ ID NO: 41055 - protein, 10 aa, Artificial Sequence
  Peptide Derived from Human Papillomavirus
TVSVGTAKTY

SEQ ID NO: 41056 - protein, 10 aa, Artificial Sequence
  Peptide Derived from Human Papillomavirus
TVTYHSETQR

SEQ ID NO: 41057 - protein, 8 aa, Artificial Sequence
  Peptide Derived from Human Papillomavirus
VAWDSVYY

SEQ ID NO: 41058 - protein, 8 aa, Artificial Sequence
  Peptide Derived from Human Papillomavirus
VSATQLVK

SEQ ID NO: 41059 - protein, 8 aa, Artificial Sequence
  Peptide Derived from Human Papillomavirus
VSHRGLYY

SEQ ID NO: 41060 - protein, 10 aa, Artificial Sequence
  Peptide Derived from Human Papillomavirus
VSHRGLYYVK

SEQ ID NO: 41061 - protein, 9 aa, Artificial Sequence
  Peptide Derived from Human Papillomavirus
VSVGTAKTY

SEQ ID NO: 41062 - protein, 9 aa, Artificial Sequence
  Peptide Derived from Human Papillomavirus
VTYHSETQR

SEQ ID NO: 41063 - protein, 11 aa, Artificial Sequence
  Peptide Derived from Human Papillomavirus
VTYHSETQRTK

SEQ ID NO: 41064 - protein, 9 aa, Artificial Sequence
  Peptide Derived from Human Papillomavirus
VVPAYNISK

SEQ ID NO: 41065 - protein, 11 aa, Artificial Sequence
  Peptide Derived from Human Papillomavirus
VVPAYNISKSK

SEQ ID NO: 41066 - protein, 10 aa, Artificial Sequence
  Peptide Derived from Human Papillomavirus
WDKTATCVSH

SEQ ID NO: 41067 - protein, 11 aa, Artificial Sequence
  Peptide Derived from Human Papillomavirus
WDKTATCVSHR

SEQ ID NO: 41068 - protein, 10 aa, Artificial Sequence
  Peptide Derived from Human Papillomavirus
WNTEPTHCFK

SEQ ID NO: 41069 - protein, 11 aa, Artificial Sequence
  Peptide Derived from Human Papillomavirus
WNTEPTHCFKK

SEQ ID NO: 41070 - protein, 8 aa, Artificial Sequence
  Peptide Derived from Human Papillomavirus
WTGAGNEK

SEQ ID NO: 41071 - protein, 10 aa, Artificial Sequence
  Peptide Derived from Human Papillomavirus
YGNTGTWEVH

SEQ ID NO: 41072 - protein, 9 aa, Artificial Sequence
  Peptide Derived from Human Papillomavirus
YGQTSAATR

SEQ ID NO: 41073 - protein, 10 aa, Artificial Sequence
  Peptide Derived from Human Papillomavirus
YIEFKSECEK

SEQ ID NO: 41074 - protein, 11 aa, Artificial Sequence
  Peptide Derived from Human Papillomavirus
YIEFKSECEKY

SEQ ID NO: 41075 - protein, 10 aa, Artificial Sequence
  Peptide Derived from Human Papillomavirus
YMTDAGTWDK

SEQ ID NO: 41076 - protein, 9 aa, Artificial Sequence
  Peptide Derived from Human Papillomavirus
YNISKSKAH

SEQ ID NO: 41077 - protein, 10 aa, Artificial Sequence
  Peptide Derived from Human Papillomavirus
YNISKSKAHK

SEQ ID NO: 41078 - protein, 9 aa, Artificial Sequence
  Peptide Derived from Human Papillomavirus
YNTFYIEFK

SEQ ID NO: 41079 - protein, 11 aa, Artificial Sequence
  Peptide Derived from Human Papillomavirus
YSSTVSVGTAK

SEQ ID NO: 41080 - protein, 8 aa, Artificial Sequence
  Peptide Derived from Human Papillomavirus
YVAWDSVY

SEQ ID NO: 41081 - protein, 9 aa, Artificial Sequence
  Peptide Derived from Human Papillomavirus
YVAWDSVYY

SEQ ID NO: 41082 - protein, 10 aa, Artificial Sequence
  Peptide Derived from Human Papillomavirus
YVKEGYNTFY

SEQ ID NO: 41083 - protein, 11 aa, Artificial Sequence
  Peptide Derived from Human Papillomavirus
CAYAWVLVFVY

SEQ ID NO: 41084 - protein, 11 aa, Artificial Sequence
  Peptide Derived from Human Papillomavirus
CFCVCMYVCCH

SEQ ID NO: 41085 - protein, 10 aa, Artificial Sequence
  Peptide Derived from Human Papillomavirus
CFLLPMLLLH

SEQ ID NO: 41086 - protein, 9 aa, Artificial Sequence
  Peptide Derived from Human Papillomavirus
CVCMYVCCH

SEQ ID NO: 41087 - protein, 8 aa, Artificial Sequence
  Peptide Derived from Human Papillomavirus
FCFCVCMY

SEQ ID NO: 41088 - protein, 11 aa, Artificial Sequence
  Peptide Derived from Human Papillomavirus
FCFLLPMLLLH

SEQ ID NO: 41089 - protein, 10 aa, Artificial Sequence
  Peptide Derived from Human Papillomavirus
FCVCMYVCCH

SEQ ID NO: 41090 - protein, 10 aa, Artificial Sequence
  Peptide Derived from Human Papillomavirus
FLFCFCVCMY

SEQ ID NO: 41091 - protein, 9 aa, Artificial Sequence
  Peptide Derived from Human Papillomavirus
FLLPMLLLH

SEQ ID NO: 41092 - protein, 11 aa, Artificial Sequence
  Peptide Derived from Human Papillomavirus
FLLPMLLLHIH

SEQ ID NO: 41093 - protein, 11 aa, Artificial Sequence
  Peptide Derived from Human Papillomavirus
IFLFCFCVCMY

SEQ ID NO: 41094 - protein, 11 aa, Artificial Sequence
  Peptide Derived from Human Papillomavirus
ITSPATAFTVY

SEQ ID NO: 41095 - protein, 9 aa, Artificial Sequence
  Peptide Derived from Human Papillomavirus
LFCFCVCMY

SEQ ID NO: 41096 - protein, 8 aa, Artificial Sequence
  Peptide Derived from Human Papillomavirus
LLPMLLLH

SEQ ID NO: 41097 - protein, 10 aa, Artificial Sequence
  Peptide Derived from Human Papillomavirus
LLPMLLLHIH

SEQ ID NO: 41098 - protein, 10 aa, Artificial Sequence
  Peptide Derived from Human Papillomavirus
LLPSVCMCAY

SEQ ID NO: 41099 - protein, 8 aa, Artificial Sequence
  Peptide Derived from Human Papillomavirus
PATAFTVY

SEQ ID NO: 41100 - protein, 11 aa, Artificial Sequence
  Peptide Derived from Human Papillomavirus
PLLPSVCMCAY

SEQ ID NO: 41101 - protein, 8 aa, Artificial Sequence
  Peptide Derived from Human Papillomavirus
PMLLLHIH

SEQ ID NO: 41102 - protein, 8 aa, Artificial Sequence
  Peptide Derived from Human Papillomavirus
PSVCMCAY

SEQ ID NO: 41103 - protein, 10 aa, Artificial Sequence
  Peptide Derived from Human Papillomavirus
TSPATAFTVY

SEQ ID NO: 41104 - protein, 8 aa, Artificial Sequence
  Peptide Derived from Human Papillomavirus
VCMYVCCH

SEQ ID NO: 41105 - protein, 9 aa, Artificial Sequence
  Peptide Derived from Human Papillomavirus
YAWVLVFVY

SEQ ID NO: 41106 - protein, 10 aa, Artificial Sequence
  Peptide Derived from Human Papillomavirus
AACHKCIDFY

SEQ ID NO: 41107 - protein, 9 aa, Artificial Sequence
  Peptide Derived from Human Papillomavirus
ACHKCIDFY

SEQ ID NO: 41108 - protein, 11 aa, Artificial Sequence
  Peptide Derived from Human Papillomavirus
ACHKCIDFYSR

SEQ ID NO: 41109 - protein, 9 aa, Artificial Sequence
  Peptide Derived from Human Papillomavirus
AFKDLFVVY

SEQ ID NO: 41110 - protein, 10 aa, Artificial Sequence
  Peptide Derived from Human Papillomavirus
AFKDLFVVYR

SEQ ID NO: 41111 - protein, 9 aa, Artificial Sequence
  Peptide Derived from Human Papillomavirus
AGHYRGQCH

SEQ ID NO: 41112 - protein, 9 aa, Artificial Sequence
  Peptide Derived from Human Papillomavirus
CCNRARQER

SEQ ID NO: 41113 - protein, 9 aa, Artificial Sequence
  Peptide Derived from Human Papillomavirus
CIDFYSRIR

SEQ ID NO: 41114 - protein, 8 aa, Artificial Sequence
  Peptide Derived from Human Papillomavirus
CNRARQER

SEQ ID NO: 41115 - protein, 11 aa, Artificial Sequence
  Peptide Derived from Human Papillomavirus
CNRARQERLQR

SEQ ID NO: 41116 - protein, 10 aa, Artificial Sequence
  Peptide Derived from Human Papillomavirus
DFYSRIRELR

SEQ ID NO: 41117 - protein, 11 aa, Artificial Sequence
  Peptide Derived from Human Papillomavirus
DFYSRIRELRH

SEQ ID NO: 41118 - protein, 8 aa, Artificial Sequence
  Peptide Derived from Human Papillomavirus
DIEITCVY

SEQ ID NO: 41119 - protein, 10 aa, Artificial Sequence
  Peptide Derived from Human Papillomavirus
DIEITCVYCK

SEQ ID NO: 41120 - protein, 9 aa, Artificial Sequence
  Peptide Derived from Human Papillomavirus
DSIPHAACH

SEQ ID NO: 41121 - protein, 10 aa, Artificial Sequence
  Peptide Derived from Human Papillomavirus
DSIPHAACHK

SEQ ID NO: 41122 - protein, 10 aa, Artificial Sequence
  Peptide Derived from Human Papillomavirus
DSVYGDTLEK

SEQ ID NO: 41123 - protein, 8 aa, Artificial Sequence
  Peptide Derived from Human Papillomavirus
EDPTRRPY

SEQ ID NO: 41124 - protein, 9 aa, Artificial Sequence
  Peptide Derived from Human Papillomavirus
EDPTRRPYK

SEQ ID NO: 41125 - protein, 11 aa, Artificial Sequence
  Peptide Derived from Human Papillomavirus
EFAFKDLFVVY

SEQ ID NO: 41126 - protein, 8 aa, Artificial Sequence
  Peptide Derived from Human Papillomavirus
EITCVYCK

SEQ ID NO: 41127 - protein, 10 aa, Artificial Sequence
  Peptide Derived from Human Papillomavirus
ELRHYSDSVY

SEQ ID NO: 41128 - protein, 11 aa, Artificial Sequence
  Peptide Derived from Human Papillomavirus
ELTEVFEFAFK

SEQ ID NO: 41129 - protein, 8 aa, Artificial Sequence
  Peptide Derived from Human Papillomavirus
EVFEFAFK

SEQ ID NO: 41130 - protein, 10 aa, Artificial Sequence
  Peptide Derived from Human Papillomavirus
FAFKDLFVVY

SEQ ID NO: 41131 - protein, 11 aa, Artificial Sequence
  Peptide Derived from Human Papillomavirus
FAFKDLFVVYR

SEQ ID NO: 41132 - protein, 10 aa, Artificial Sequence
  Peptide Derived from Human Papillomavirus
FVVYRDSIPH

SEQ ID NO: 41133 - protein, 8 aa, Artificial Sequence
  Peptide Derived from Human Papillomavirus
GLYNLLIR

SEQ ID NO: 41134 - protein, 11 aa, Artificial Sequence
  Peptide Derived from Human Papillomavirus
GLYNLLIRCLR

SEQ ID NO: 41135 - protein, 11 aa, Artificial Sequence
  Peptide Derived from Human Papillomavirus
HAACHKCIDFY

SEQ ID NO: 41136 - protein, 9 aa, Artificial Sequence
  Peptide Derived from Human Papillomavirus
HLNEKRRFH

SEQ ID NO: 41137 - protein, 8 aa, Artificial Sequence
  Peptide Derived from Human Papillomavirus
HNIAGHYR

SEQ ID NO: 41138 - protein, 8 aa, Artificial Sequence
  Peptide Derived from Human Papillomavirus
HSCCNRAR

SEQ ID NO: 41139 - protein, 11 aa, Artificial Sequence
  Peptide Derived from Human Papillomavirus
HSCCNRARQER

SEQ ID NO: 41140 - protein, 10 aa, Artificial Sequence
  Peptide Derived from Human Papillomavirus
IAGHYRGQCH

SEQ ID NO: 41141 - protein, 8 aa, Artificial Sequence
  Peptide Derived from Human Papillomavirus
IDFYSRIR

SEQ ID NO: 41142 - protein, 11 aa, Artificial Sequence
  Peptide Derived from Human Papillomavirus
IDFYSRIRELR

SEQ ID NO: 41143 - protein, 8 aa, Artificial Sequence
  Peptide Derived from Human Papillomavirus
KCIDFYSR

SEQ ID NO: 41144 - protein, 10 aa, Artificial Sequence
  Peptide Derived from Human Papillomavirus
KCIDFYSRIR

SEQ ID NO: 41145 - protein, 8 aa, Artificial Sequence
  Peptide Derived from Human Papillomavirus
KDLFVVYR

SEQ ID NO: 41146 - protein, 8 aa, Artificial Sequence
  Peptide Derived from Human Papillomavirus
KLRHLNEK

SEQ ID NO: 41147 - protein, 9 aa, Artificial Sequence
  Peptide Derived from Human Papillomavirus
KLRHLNEKR

SEQ ID NO: 41148 - protein, 10 aa, Artificial Sequence
  Peptide Derived from Human Papillomavirus
KLRHLNEKRR

SEQ ID NO: 41149 - protein, 8 aa, Artificial Sequence
  Peptide Derived from Human Papillomavirus
KLTNTGLY

SEQ ID NO: 41150 - protein, 11 aa, Artificial Sequence
  Peptide Derived from Human Papillomavirus
LFVVYRDSIPH

SEQ ID NO: 41151 - protein, 9 aa, Artificial Sequence
  Peptide Derived from Human Papillomavirus
LIRCLRCQK

SEQ ID NO: 41152 - protein, 10 aa, Artificial Sequence
  Peptide Derived from Human Papillomavirus
LLIRCLRCQK

SEQ ID NO: 41153 - protein, 8 aa, Artificial Sequence
  Peptide Derived from Human Papillomavirus
LNEKRRFH

SEQ ID NO: 41154 - protein, 8 aa, Artificial Sequence
  Peptide Derived from Human Papillomavirus
LNPAEKLR

SEQ ID NO: 41155 - protein, 9 aa, Artificial Sequence
  Peptide Derived from Human Papillomavirus
LNPAEKLRH

SEQ ID NO: 41156 - protein, 10 aa, Artificial Sequence
  Peptide Derived from Human Papillomavirus
LTEVFEFAFK

SEQ ID NO: 41157 - protein, 9 aa, Artificial Sequence
  Peptide Derived from Human Papillomavirus
MARFEDPTR

SEQ ID NO: 41158 - protein, 10 aa, Artificial Sequence
  Peptide Derived from Human Papillomavirus
MARFEDPTRR

SEQ ID NO: 41159 - protein, 11 aa, Artificial Sequence
  Peptide Derived from Human Papillomavirus
NIAGHYRGQCH

SEQ ID NO: 41160 - protein, 8 aa, Artificial Sequence
  Peptide Derived from Human Papillomavirus
NLLIRCLR

SEQ ID NO: 41161 - protein, 11 aa, Artificial Sequence
  Peptide Derived from Human Papillomavirus
NLLIRCLRCQK

SEQ ID NO: 41162 - protein, 10 aa, Artificial Sequence
  Peptide Derived from Human Papillomavirus
NTGLYNLLIR

SEQ ID NO: 41163 - protein, 11 aa, Artificial Sequence
  Peptide Derived from Human Papillomavirus
PAEKLRHLNEK

SEQ ID NO: 41164 - protein, 9 aa, Artificial Sequence
  Peptide Derived from Human Papillomavirus
PLNPAEKLR

SEQ ID NO: 41165 - protein, 10 aa, Artificial Sequence
  Peptide Derived from Human Papillomavirus
PLNPAEKLRH

SEQ ID NO: 41166 - protein, 8 aa, Artificial Sequence
  Peptide Derived from Human Papillomavirus
QCHSCCNR

SEQ ID NO: 41167 - protein, 10 aa, Artificial Sequence
  Peptide Derived from Human Papillomavirus
QCHSCCNRAR

SEQ ID NO: 41168 - protein, 9 aa, Artificial Sequence
  Peptide Derived from Human Papillomavirus
QDIEITCVY

SEQ ID NO: 41169 - protein, 11 aa, Artificial Sequence
  Peptide Derived from Human Papillomavirus
QDIEITCVYCK

SEQ ID NO: 41170 - protein, 9 aa, Artificial Sequence
  Peptide Derived from Human Papillomavirus
RARQERLQR

SEQ ID NO: 41171 - protein, 10 aa, Artificial Sequence
  Peptide Derived from Human Papillomavirus
RARQERLQRR

SEQ ID NO: 41172 - protein, 11 aa, Artificial Sequence
  Peptide Derived from Human Papillomavirus
RARQERLQRRR

SEQ ID NO: 41173 - protein, 11 aa, Artificial Sequence
  Peptide Derived from Human Papillomavirus
RCQKPLNPAEK

SEQ ID NO: 41174 - protein, 10 aa, Artificial Sequence
  Peptide Derived from Human Papillomavirus
RDSIPHAACH

SEQ ID NO: 41175 - protein, 11 aa, Artificial Sequence
  Peptide Derived from Human Papillomavirus
RDSIPHAACHK

SEQ ID NO: 41176 - protein, 8 aa, Artificial Sequence
  Peptide Derived from Human Papillomavirus
RFEDPTRR

SEQ ID NO: 41177 - protein, 10 aa, Artificial Sequence
  Peptide Derived from Human Papillomavirus
RFEDPTRRPY

SEQ ID NO: 41178 - protein, 11 aa, Artificial Sequence
  Peptide Derived from Human Papillomavirus
RFEDPTRRPYK

SEQ ID NO: 41179 - protein, 8 aa, Artificial Sequence
  Peptide Derived from Human Papillomavirus
RFHNIAGH

SEQ ID NO: 41180 - protein, 9 aa, Artificial Sequence
  Peptide Derived from Human Papillomavirus
RFHNIAGHY

SEQ ID NO: 41181 - protein, 10 aa, Artificial Sequence
  Peptide Derived from Human Papillomavirus
RFHNIAGHYR

SEQ ID NO: 41182 - protein, 10 aa, Artificial Sequence
  Peptide Derived from Human Papillomavirus
RGQCHSCCNR

SEQ ID NO: 41183 - protein, 8 aa, Artificial Sequence
  Peptide Derived from Human Papillomavirus
RIRELRHY

SEQ ID NO: 41184 - protein, 10 aa, Artificial Sequence
  Peptide Derived from Human Papillomavirus
SCCNRARQER

SEQ ID NO: 41185 - protein, 11 aa, Artificial Sequence
  Peptide Derived from Human Papillomavirus
SDSVYGDTLEK

SEQ ID NO: 41186 - protein, 8 aa, Artificial Sequence
  Peptide Derived from Human Papillomavirus
SIPHAACH

SEQ ID NO: 41187 - protein, 9 aa, Artificial Sequence
  Peptide Derived from Human Papillomavirus
SIPHAACHK

SEQ ID NO: 41188 - protein, 11 aa, Artificial Sequence
  Peptide Derived from Human Papillomavirus
SLQDIEITCVY

SEQ ID NO: 41189 - protein, 9 aa, Artificial Sequence
  Peptide Derived from Human Papillomavirus
SVYGDTLEK

SEQ ID NO: 41190 - protein, 9 aa, Artificial Sequence
  Peptide Derived from Human Papillomavirus
TGLYNLLIR

SEQ ID NO: 41191 - protein, 11 aa, Artificial Sequence
  Peptide Derived from Human Papillomavirus
TLEKLTNTGLY

SEQ ID NO: 41192 - protein, 11 aa, Artificial Sequence
  Peptide Derived from Human Papillomavirus
TNTGLYNLLIR

SEQ ID NO: 41193 - protein, 9 aa, Artificial Sequence
  Peptide Derived from Human Papillomavirus
VVYRDSIPH

SEQ ID NO: 41194 - protein, 9 aa, Artificial Sequence
  Peptide Derived from Human Papillomavirus
YNLLIRCLR

SEQ ID NO: 41195 - protein, 8 aa, Artificial Sequence
  Peptide Derived from Human Papillomavirus
YSRIRELR

SEQ ID NO: 41196 - protein, 9 aa, Artificial Sequence
  Peptide Derived from Human Papillomavirus
YSRIRELRH

SEQ ID NO: 41197 - protein, 10 aa, Artificial Sequence
  Peptide Derived from Human Papillomavirus
YSRIRELRHY

SEQ ID NO: 41198 - protein, 9 aa, Artificial Sequence
  Peptide Derived from Human Papillomavirus
ATLQDIVLH

SEQ ID NO: 41199 - protein, 9 aa, Artificial Sequence
  Peptide Derived from Human Papillomavirus
CCKCEARIK

SEQ ID NO: 41200 - protein, 9 aa, Artificial Sequence
  Peptide Derived from Human Papillomavirus
CMCCKCEAR

SEQ ID NO: 41201 - protein, 11 aa, Artificial Sequence
  Peptide Derived from Human Papillomavirus
CMCCKCEARIK

SEQ ID NO: 41202 - protein, 11 aa, Artificial Sequence
  Peptide Derived from Human Papillomavirus
DGVNHQHLPAR

SEQ ID NO: 41203 - protein, 9 aa, Artificial Sequence
  Peptide Derived from Human Papillomavirus
EIDGVNHQH

SEQ ID NO: 41204 - protein, 9 aa, Artificial Sequence
  Peptide Derived from Human Papillomavirus
EIPVDLLCH

SEQ ID NO: 41205 - protein, 10 aa, Artificial Sequence
  Peptide Derived from Human Papillomavirus
ENDEIDGVNH

SEQ ID NO: 41206 - protein, 8 aa, Artificial Sequence
  Peptide Derived from Human Papillomavirus
ESSADDLR

SEQ ID NO: 41207 - protein, 10 aa, Artificial Sequence
  Peptide Derived from Human Papillomavirus
GVNHQHLPAR

SEQ ID NO: 41208 - protein, 11 aa, Artificial Sequence
  Peptide Derived from Human Papillomavirus
GVNHQHLPARR

SEQ ID NO: 41209 - protein, 11 aa, Artificial Sequence
  Peptide Derived from Human Papillomavirus
HLPARRAEPQR

SEQ ID NO: 41210 - protein, 9 aa, Artificial Sequence
  Peptide Derived from Human Papillomavirus
HTMLCMCCK

SEQ ID NO: 41211 - protein, 8 aa, Artificial Sequence
  Peptide Derived from Human Papillomavirus
IDGVNHQH

SEQ ID NO: 41212 - protein, 10 aa, Artificial Sequence
  Peptide Derived from Human Papillomavirus
KATLQDIVLH

SEQ ID NO: 41213 - protein, 10 aa, Artificial Sequence
  Peptide Derived from Human Papillomavirus
LCMCCKCEAR

SEQ ID NO: 41214 - protein, 11 aa, Artificial Sequence
  Peptide Derived from Human Papillomavirus
LVVESSADDLR

SEQ ID NO: 41215 - protein, 8 aa, Artificial Sequence
  Peptide Derived from Human Papillomavirus
MCCKCEAR

SEQ ID NO: 41216 - protein, 10 aa, Artificial Sequence
  Peptide Derived from Human Papillomavirus
MCCKCEARIK

SEQ ID NO: 41217 - protein, 11 aa, Artificial Sequence
  Peptide Derived from Human Papillomavirus
MLCMCCKCEAR

SEQ ID NO: 41218 - protein, 9 aa, Artificial Sequence
  Peptide Derived from Human Papillomavirus
NDEIDGVNH

SEQ ID NO: 41219 - protein, 11 aa, Artificial Sequence
  Peptide Derived from Human Papillomavirus
NDEIDGVNHQH

SEQ ID NO: 41220 - protein, 9 aa, Artificial Sequence
  Peptide Derived from Human Papillomavirus
PARRAEPQR

SEQ ID NO: 41221 - protein, 10 aa, Artificial Sequence
  Peptide Derived from Human Papillomavirus
PARRAEPQRH

SEQ ID NO: 41222 - protein, 11 aa, Artificial Sequence
  Peptide Derived from Human Papillomavirus
QNEIPVDLLCH

SEQ ID NO: 41223 - protein, 8 aa, Artificial Sequence
  Peptide Derived from Human Papillomavirus
TLQDIVLH

SEQ ID NO: 41224 - protein, 8 aa, Artificial Sequence
  Peptide Derived from Human Papillomavirus
TMLCMCCK

SEQ ID NO: 41225 - protein, 9 aa, Artificial Sequence
  Peptide Derived from Human Papillomavirus
VNHQHLPAR

SEQ ID NO: 41226 - protein, 10 aa, Artificial Sequence
  Peptide Derived from Human Papillomavirus
VNHQHLPARR

SEQ ID NO: 41227 - protein, 10 aa, Artificial Sequence
  Peptide Derived from Human Papillomavirus
VVESSADDLR

SEQ ID NO: 41228 - protein, 10 aa, Artificial Sequence
  Peptide Derived from Human Papillomavirus
AAPAENKDPY

SEQ ID NO: 41229 - protein, 11 aa, Artificial Sequence
  Peptide Derived from Human Papillomavirus
AATSNVSEDVR

SEQ ID NO: 41230 - protein, 9 aa, Artificial Sequence
  Peptide Derived from Human Papillomavirus
ACAGVEIGR

SEQ ID NO: 41231 - protein, 8 aa, Artificial Sequence
  Peptide Derived from Human Papillomavirus
ADVMSYIH

SEQ ID NO: 41232 - protein, 11 aa, Artificial Sequence
  Peptide Derived from Human Papillomavirus
AGGGNKQDIPK

SEQ ID NO: 41233 - protein, 8 aa, Artificial Sequence
  Peptide Derived from Human Papillomavirus
AIGEHWAK

SEQ ID NO: 41234 - protein, 11 aa, Artificial Sequence
  Peptide Derived from Human Papillomavirus
ALWRPSDNTVY

SEQ ID NO: 41235 - protein, 11 aa, Artificial Sequence
  Peptide Derived from Human Papillomavirus
AMDFSTLQDTK

SEQ ID NO: 41236 - protein, 8 aa, Artificial Sequence
  Peptide Derived from Human Papillomavirus
ASPGSCVY

SEQ ID NO: 41237 - protein, 11 aa, Artificial Sequence
  Peptide Derived from Human Papillomavirus
ASTQSPVPGQY

SEQ ID NO: 41238 - protein, 9 aa, Artificial Sequence
  Peptide Derived from Human Papillomavirus
ATKFKQYSR

SEQ ID NO: 41239 - protein, 10 aa, Artificial Sequence
  Peptide Derived from Human Papillomavirus
ATKFKQYSRH

SEQ ID NO: 41240 - protein, 10 aa, Artificial Sequence
  Peptide Derived from Human Papillomavirus
ATSNVSEDVR

SEQ ID NO: 41241 - protein, 9 aa, Artificial Sequence
  Peptide Derived from Human Papillomavirus
ATTSSKPAK

SEQ ID NO: 41242 - protein, 10 aa, Artificial Sequence
  Peptide Derived from Human Papillomavirus
ATTSSKPAKR

SEQ ID NO: 41243 - protein, 8 aa, Artificial Sequence
  Peptide Derived from Human Papillomavirus
CAGVEIGR

SEQ ID NO: 41244 - protein, 8 aa, Artificial Sequence
  Peptide Derived from Human Papillomavirus
CAPAIGEH

SEQ ID NO: 41245 - protein, 11 aa, Artificial Sequence
  Peptide Derived from Human Papillomavirus
CAPAIGEHWAK

SEQ ID NO: 41246 - protein, 10 aa, Artificial Sequence
  Peptide Derived from Human Papillomavirus
CGHYIILFLR

SEQ ID NO: 41247 - protein, 10 aa, Artificial Sequence
  Peptide Derived from Human Papillomavirus
CLRREQLFAR

SEQ ID NO: 41248 - protein, 11 aa, Artificial Sequence
  Peptide Derived from Human Papillomavirus
CLRREQLFARH

SEQ ID NO: 41249 - protein, 10 aa, Artificial Sequence
  Peptide Derived from Human Papillomavirus
CLYTRVLILH

SEQ ID NO: 41250 - protein, 11 aa, Artificial Sequence
  Peptide Derived from Human Papillomavirus
CLYTRVLILHY

SEQ ID NO: 41251 - protein, 8 aa, Artificial Sequence
  Peptide Derived from Human Papillomavirus
DAAPAENK

SEQ ID NO: 41252 - protein, 11 aa, Artificial Sequence
  Peptide Derived from Human Papillomavirus
DAAPAENKDPY

SEQ ID NO: 41253 - protein, 8 aa, Artificial Sequence
  Peptide Derived from Human Papillomavirus
DATKFKQY

SEQ ID NO: 41254 - protein, 10 aa, Artificial Sequence
  Peptide Derived from Human Papillomavirus
DATKFKQYSR

SEQ ID NO: 41255 - protein, 11 aa, Artificial Sequence
  Peptide Derived from Human Papillomavirus
DATKFKQYSRH

SEQ ID NO: 41256 - protein, 8 aa, Artificial Sequence
  Peptide Derived from Human Papillomavirus
DCPPLELK

SEQ ID NO: 41257 - protein, 11 aa, Artificial Sequence
  Peptide Derived from Human Papillomavirus
DDYVTPTSIFY

SEQ ID NO: 41258 - protein, 9 aa, Artificial Sequence
  Peptide Derived from Human Papillomavirus
DFSTLQDTK

SEQ ID NO: 41259 - protein, 9 aa, Artificial Sequence
  Peptide Derived from Human Papillomavirus
DGDMVDTGY

SEQ ID NO: 41260 - protein, 8 aa, Artificial Sequence
  Peptide Derived from Human Papillomavirus
DICQSICK

SEQ ID NO: 41261 - protein, 9 aa, Artificial Sequence
  Peptide Derived from Human Papillomavirus
DICQSICKY

SEQ ID NO: 41262 - protein, 8 aa, Artificial Sequence
  Peptide Derived from Human Papillomavirus
DIPKVSAY

SEQ ID NO: 41263 - protein, 10 aa, Artificial Sequence
  Peptide Derived from Human Papillomavirus
DIPKVSAYQY

SEQ ID NO: 41264 - protein, 11 aa, Artificial Sequence
  Peptide Derived from Human Papillomavirus
DIPKVSAYQYR

SEQ ID NO: 41265 - protein, 9 aa, Artificial Sequence
  Peptide Derived from Human Papillomavirus
DLDQYPLGR

SEQ ID NO: 41266 - protein, 10 aa, Artificial Sequence
  Peptide Derived from Human Papillomavirus
DLDQYPLGRK

SEQ ID NO: 41267 - protein, 8 aa, Artificial Sequence
  Peptide Derived from Human Papillomavirus
DNVSVDYK

SEQ ID NO: 41268 - protein, 8 aa, Artificial Sequence
  Peptide Derived from Human Papillomavirus
DSMFFCLR

SEQ ID NO: 41269 - protein, 9 aa, Artificial Sequence
  Peptide Derived from Human Papillomavirus
DSMFFCLRR

SEQ ID NO: 41270 - protein, 9 aa, Artificial Sequence
  Peptide Derived from Human Papillomavirus
DSQLFNKPY

SEQ ID NO: 41271 - protein, 11 aa, Artificial Sequence
  Peptide Derived from Human Papillomavirus
DTSIYNPETQR

SEQ ID NO: 41272 - protein, 8 aa, Artificial Sequence
  Peptide Derived from Human Papillomavirus
DTVPQSLY

SEQ ID NO: 41273 - protein, 10 aa, Artificial Sequence
  Peptide Derived from Human Papillomavirus
DTVPQSLYIK

SEQ ID NO: 41274 - protein, 10 aa, Artificial Sequence
  Peptide Derived from Human Papillomavirus
DVRDNVSVDY

SEQ ID NO: 41275 - protein, 11 aa, Artificial Sequence
  Peptide Derived from Human Papillomavirus
DVRDNVSVDYK

SEQ ID NO: 41276 - protein, 10 aa, Artificial Sequence
  Peptide Derived from Human Papillomavirus
EDGDMVDTGY

SEQ ID NO: 41277 - protein, 11 aa, Artificial Sequence
  Peptide Derived from Human Papillomavirus
EDVRDNVSVDY

SEQ ID NO: 41278 - protein, 8 aa, Artificial Sequence
  Peptide Derived from Human Papillomavirus
ENKDPYDK

SEQ ID NO: 41279 - protein, 10 aa, Artificial Sequence
  Peptide Derived from Human Papillomavirus
ENKDPYDKLK

SEQ ID NO: 41280 - protein, 8 aa, Artificial Sequence
  Peptide Derived from Human Papillomavirus
FARHFWNR

SEQ ID NO: 41281 - protein, 11 aa, Artificial Sequence
  Peptide Derived from Human Papillomavirus
FCLRREQLFAR

SEQ ID NO: 41282 - protein, 9 aa, Artificial Sequence
  Peptide Derived from Human Papillomavirus
FGLPDTSIY

SEQ ID NO: 41283 - protein, 8 aa, Artificial Sequence
  Peptide Derived from Human Papillomavirus
FLQMALWR

SEQ ID NO: 41284 - protein, 8 aa, Artificial Sequence
  Peptide Derived from Human Papillomavirus
FLVQAGLR

SEQ ID NO: 41285 - protein, 9 aa, Artificial Sequence
  Peptide Derived from Human Papillomavirus
FLVQAGLRR

SEQ ID NO: 41286 - protein, 10 aa, Artificial Sequence
  Peptide Derived from Human Papillomavirus
FLVQAGLRRK

SEQ ID NO: 41287 - protein, 8 aa, Artificial Sequence
  Peptide Derived from Human Papillomavirus
FNKPYWLH

SEQ ID NO: 41288 - protein, 9 aa, Artificial Sequence
  Peptide Derived from Human Papillomavirus
FNKPYWLHK

SEQ ID NO: 41289 - protein, 8 aa, Artificial Sequence
  Peptide Derived from Human Papillomavirus
FSLDLDQY

SEQ ID NO: 41290 - protein, 8 aa, Artificial Sequence
  Peptide Derived from Human Papillomavirus
FSTLQDTK

SEQ ID NO: 41291 - protein, 11 aa, Artificial Sequence
  Peptide Derived from Human Papillomavirus
FVQSVAITCQK

SEQ ID NO: 41292 - protein, 9 aa, Artificial Sequence
  Peptide Derived from Human Papillomavirus
GCAPAIGEH

SEQ ID NO: 41293 - protein, 9 aa, Artificial Sequence
  Peptide Derived from Human Papillomavirus
GDCPPLELK

SEQ ID NO: 41294 - protein, 8 aa, Artificial Sequence
  Peptide Derived from Human Papillomavirus
GDMVDTGY

SEQ ID NO: 41295 - protein, 9 aa, Artificial Sequence
  Peptide Derived from Human Papillomavirus
GDSMFFCLR

SEQ ID NO: 41296 - protein, 10 aa, Artificial Sequence
  Peptide Derived from Human Papillomavirus
GDSMFFCLRR

SEQ ID NO: 41297 - protein, 9 aa, Artificial Sequence
  Peptide Derived from Human Papillomavirus
GDTVPQSLY

SEQ ID NO: 41298 - protein, 11 aa, Artificial Sequence
  Peptide Derived from Human Papillomavirus
GDTVPQSLYIK

SEQ ID NO: 41299 - protein, 10 aa, Artificial Sequence
  Peptide Derived from Human Papillomavirus
GGGNKQDIPK

SEQ ID NO: 41300 - protein, 9 aa, Artificial Sequence
  Peptide Derived from Human Papillomavirus
GGNKQDIPK

SEQ ID NO: 41301 - protein, 8 aa, Artificial Sequence
  Peptide Derived from Human Papillomavirus
GLPDTSIY

SEQ ID NO: 41302 - protein, 11 aa, Artificial Sequence
  Peptide Derived from Human Papillomavirus
GLRRKPTIGPR

SEQ ID NO: 41303 - protein, 8 aa, Artificial Sequence
  Peptide Derived from Human Papillomavirus
GLSGHPFY

SEQ ID NO: 41304 - protein, 10 aa, Artificial Sequence
  Peptide Derived from Human Papillomavirus
GLSGHPFYNK

SEQ ID NO: 41305 - protein, 11 aa, Artificial Sequence
  Peptide Derived from Human Papillomavirus
GMPASPGSCVY

SEQ ID NO: 41306 - protein, 8 aa, Artificial Sequence
  Peptide Derived from Human Papillomavirus
GNKQDIPK

SEQ ID NO: 41307 - protein, 10 aa, Artificial Sequence
  Peptide Derived from Human Papillomavirus
GVGLSGHPFY

SEQ ID NO: 41308 - protein, 8 aa, Artificial Sequence
  Peptide Derived from Human Papillomavirus
HIIICGHY

SEQ ID NO: 41309 - protein, 10 aa, Artificial Sequence
  Peptide Derived from Human Papillomavirus
HLLPLYGPLY

SEQ ID NO: 41310 - protein, 11 aa, Artificial Sequence
  Peptide Derived from Human Papillomavirus
HLLPLYGPLYH

SEQ ID NO: 41311 - protein, 8 aa, Artificial Sequence
  Peptide Derived from Human Papillomavirus
HNNGVCWH

SEQ ID NO: 41312 - protein, 9 aa, Artificial Sequence
  Peptide Derived from Human Papillomavirus
HSILVYMVH

SEQ ID NO: 41313 - protein, 11 aa, Artificial Sequence
  Peptide Derived from Human Papillomavirus
ICGHYIILFLR

SEQ ID NO: 41314 - protein, 8 aa, Artificial Sequence
  Peptide Derived from Human Papillomavirus
ICQSICKY

SEQ ID NO: 41315 - protein, 11 aa, Artificial Sequence
  Peptide Derived from Human Papillomavirus
ICQSICKYPDY

SEQ ID NO: 41316 - protein, 9 aa, Artificial Sequence
  Peptide Derived from Human Papillomavirus
IFLQMALWR

SEQ ID NO: 41317 - protein, 9 aa, Artificial Sequence
  Peptide Derived from Human Papillomavirus
IFYHAGSSR

SEQ ID NO: 41318 - protein, 11 aa, Artificial Sequence
  Peptide Derived from Human Papillomavirus
ILGCAPAIGEH

SEQ ID NO: 41319 - protein, 10 aa, Artificial Sequence
  Peptide Derived from Human Papillomavirus
ILHYHLLPLY

SEQ ID NO: 41320 - protein, 10 aa, Artificial Sequence
  Peptide Derived from Human Papillomavirus
ITLTADVMSY

SEQ ID NO: 41321 - protein, 11 aa, Artificial Sequence
  Peptide Derived from Human Papillomavirus
IVTSDSQLFNK

SEQ ID NO: 41322 - protein, 9 aa, Artificial Sequence
  Peptide Derived from Human Papillomavirus
KDAAPAENK

SEQ ID NO: 41323 - protein, 8 aa, Artificial Sequence
  Peptide Derived from Human Papillomavirus
KDPYDKLK

SEQ ID NO: 41324 - protein, 10 aa, Artificial Sequence
  Peptide Derived from Human Papillomavirus
KFGLPDTSIY

SEQ ID NO: 41325 - protein, 8 aa, Artificial Sequence
  Peptide Derived from Human Papillomavirus
KFKQYSRH

SEQ ID NO: 41326 - protein, 9 aa, Artificial Sequence
  Peptide Derived from Human Papillomavirus
KFLVQAGLR

SEQ ID NO: 41327 - protein, 10 aa, Artificial Sequence
  Peptide Derived from Human Papillomavirus
KFLVQAGLRR

SEQ ID NO: 41328 - protein, 11 aa, Artificial Sequence
  Peptide Derived from Human Papillomavirus
KFLVQAGLRRK

SEQ ID NO: 41329 - protein, 9 aa, Artificial Sequence
  Peptide Derived from Human Papillomavirus
KFSLDLDQY

SEQ ID NO: 41330 - protein, 8 aa, Artificial Sequence
  Peptide Derived from Human Papillomavirus
KFWNVDLK

SEQ ID NO: 41331 - protein, 10 aa, Artificial Sequence
  Peptide Derived from Human Papillomavirus
KFWNVDLKEK

SEQ ID NO: 41332 - protein, 8 aa, Artificial Sequence
  Peptide Derived from Human Papillomavirus
KGTACKSR

SEQ ID NO: 41333 - protein, 9 aa, Artificial Sequence
  Peptide Derived from Human Papillomavirus
KLDDTESSH

SEQ ID NO: 41334 - protein, 10 aa, Artificial Sequence
  Peptide Derived from Human Papillomavirus
KLKFWNVDLK

SEQ ID NO: 41335 - protein, 8 aa, Artificial Sequence
  Peptide Derived from Human Papillomavirus
KVSAYQYR

SEQ ID NO: 41336 - protein, 11 aa, Artificial Sequence
  Peptide Derived from Human Papillomavirus
KVSAYQYRVFR

SEQ ID NO: 41337 - protein, 8 aa, Artificial Sequence
  Peptide Derived from Human Papillomavirus
LDDTESSH

SEQ ID NO: 41338 - protein, 9 aa, Artificial Sequence
  Peptide Derived from Human Papillomavirus
LDICQSICK

SEQ ID NO: 41339 - protein, 10 aa, Artificial Sequence
  Peptide Derived from Human Papillomavirus
LDICQSICKY

SEQ ID NO: 41340 - protein, 10 aa, Artificial Sequence
  Peptide Derived from Human Papillomavirus
LDLDQYPLGR

SEQ ID NO: 41341 - protein, 11 aa, Artificial Sequence
  Peptide Derived from Human Papillomavirus
LDLDQYPLGRK

SEQ ID NO: 41342 - protein, 8 aa, Artificial Sequence
  Peptide Derived from Human Papillomavirus
LDQYPLGR

SEQ ID NO: 41343 - protein, 9 aa, Artificial Sequence
  Peptide Derived from Human Papillomavirus
LDQYPLGRK

SEQ ID NO: 41344 - protein, 9 aa, Artificial Sequence
  Peptide Derived from Human Papillomavirus
LFARHFWNR

SEQ ID NO: 41345 - protein, 9 aa, Artificial Sequence
  Peptide Derived from Human Papillomavirus
LFNKPYWLH

SEQ ID NO: 41346 - protein, 10 aa, Artificial Sequence
  Peptide Derived from Human Papillomavirus
LFNKPYWLHK

SEQ ID NO: 41347 - protein, 10 aa, Artificial Sequence
  Peptide Derived from Human Papillomavirus
LGCAPAIGEH

SEQ ID NO: 41348 - protein, 8 aa, Artificial Sequence
  Peptide Derived from Human Papillomavirus
LGVGLSGH

SEQ ID NO: 41349 - protein, 11 aa, Artificial Sequence
  Peptide Derived from Human Papillomavirus
LGVGLSGHPFY

SEQ ID NO: 41350 - protein, 11 aa, Artificial Sequence
  Peptide Derived from Human Papillomavirus
LILHYHLLPLY

SEQ ID NO: 41351 - protein, 9 aa, Artificial Sequence
  Peptide Derived from Human Papillomavirus
LLPLYGPLY

SEQ ID NO: 41352 - protein, 10 aa, Artificial Sequence
  Peptide Derived from Human Papillomavirus
LLPLYGPLYH

SEQ ID NO: 41353 - protein, 8 aa, Artificial Sequence
  Peptide Derived from Human Papillomavirus
LLTVGNPY

SEQ ID NO: 41354 - protein, 10 aa, Artificial Sequence
  Peptide Derived from Human Papillomavirus
LLTVGNPYFR

SEQ ID NO: 41355 - protein, 9 aa, Artificial Sequence
  Peptide Derived from Human Papillomavirus
LSGHPFYNK

SEQ ID NO: 41356 - protein, 8 aa, Artificial Sequence
  Peptide Derived from Human Papillomavirus
LTADVMSY

SEQ ID NO: 41357 - protein, 10 aa, Artificial Sequence
  Peptide Derived from Human Papillomavirus
LTADVMSYIH

SEQ ID NO: 41358 - protein, 9 aa, Artificial Sequence
  Peptide Derived from Human Papillomavirus
LTVGNPYFR

SEQ ID NO: 41359 - protein, 8 aa, Artificial Sequence
  Peptide Derived from Human Papillomavirus
LVQAGLRR

SEQ ID NO: 41360 - protein, 9 aa, Artificial Sequence
  Peptide Derived from Human Papillomavirus
LVQAGLRRK

SEQ ID NO: 41361 - protein, 11 aa, Artificial Sequence
  Peptide Derived from Human Papillomavirus
MCLYTRVLILH

SEQ ID NO: 41362 - protein, 10 aa, Artificial Sequence
  Peptide Derived from Human Papillomavirus
MDFSTLQDTK

SEQ ID NO: 41363 - protein, 10 aa, Artificial Sequence
  Peptide Derived from Human Papillomavirus
MGDTVPQSLY

SEQ ID NO: 41364 - protein, 9 aa, Artificial Sequence
  Peptide Derived from Human Papillomavirus
MVHIIICGH

SEQ ID NO: 41365 - protein, 10 aa, Artificial Sequence
  Peptide Derived from Human Papillomavirus
MVHIIICGHY

SEQ ID NO: 41366 - protein, 8 aa, Artificial Sequence
  Peptide Derived from Human Papillomavirus
PAENKDPY

SEQ ID NO: 41367 - protein, 10 aa, Artificial Sequence
  Peptide Derived from Human Papillomavirus
PAENKDPYDK

SEQ ID NO: 41368 - protein, 9 aa, Artificial Sequence
  Peptide Derived from Human Papillomavirus
PAIGEHWAK

SEQ ID NO: 41369 - protein, 8 aa, Artificial Sequence
  Peptide Derived from Human Papillomavirus
PAKRVRVR

SEQ ID NO: 41370 - protein, 10 aa, Artificial Sequence
  Peptide Derived from Human Papillomavirus
PAKRVRVRAR

SEQ ID NO: 41371 - protein, 11 aa, Artificial Sequence
  Peptide Derived from Human Papillomavirus
PAKRVRVRARK

SEQ ID NO: 41372 - protein, 9 aa, Artificial Sequence
  Peptide Derived from Human Papillomavirus
PASPGSCVY

SEQ ID NO: 41373 - protein, 11 aa, Artificial Sequence
  Peptide Derived from Human Papillomavirus
PDYLQMSADPY

SEQ ID NO: 41374 - protein, 8 aa, Artificial Sequence
  Peptide Derived from Human Papillomavirus
PGQYDATK

SEQ ID NO: 41375 - protein, 10 aa, Artificial Sequence
  Peptide Derived from Human Papillomavirus
PGQYDATKFK

SEQ ID NO: 41376 - protein, 10 aa, Artificial Sequence
  Peptide Derived from Human Papillomavirus
PIFLQMALWR

SEQ ID NO: 41377 - protein, 10 aa, Artificial Sequence
  Peptide Derived from Human Papillomavirus
PLDICQSICK

SEQ ID NO: 41378 - protein, 11 aa, Artificial Sequence
  Peptide Derived from Human Papillomavirus
PLDICQSICKY

SEQ ID NO: 41379 - protein, 9 aa, Artificial Sequence
  Peptide Derived from Human Papillomavirus
PLGVGLSGH

SEQ ID NO: 41380 - protein, 8 aa, Artificial Sequence
  Peptide Derived from Human Papillomavirus
PLHSILVY

SEQ ID NO: 41381 - protein, 11 aa, Artificial Sequence
  Peptide Derived from Human Papillomavirus
PLHSILVYMVH

SEQ ID NO: 41382 - protein, 10 aa, Artificial Sequence
  Peptide Derived from Human Papillomavirus
PLPLHSILVY

SEQ ID NO: 41383 - protein, 8 aa, Artificial Sequence
  Peptide Derived from Human Papillomavirus
PLYGPLYH

SEQ ID NO: 41384 - protein, 10 aa, Artificial Sequence
  Peptide Derived from Human Papillomavirus
PLYGPLYHPR

SEQ ID NO: 41385 - protein, 11 aa, Artificial Sequence
  Peptide Derived from Human Papillomavirus
PLYHPRPLPLH

SEQ ID NO: 41386 - protein, 8 aa, Artificial Sequence
  Peptide Derived from Human Papillomavirus
PSATTSSK

SEQ ID NO: 41387 - protein, 11 aa, Artificial Sequence
  Peptide Derived from Human Papillomavirus
PSATTSSKPAK

SEQ ID NO: 41388 - protein, 8 aa, Artificial Sequence
  Peptide Derived from Human Papillomavirus
PTIGPRKR

SEQ ID NO: 41389 - protein, 9 aa, Artificial Sequence
  Peptide Derived from Human Papillomavirus
PTTSLVDTY

SEQ ID NO: 41390 - protein, 10 aa, Artificial Sequence
  Peptide Derived from Human Papillomavirus
PTTSLVDTYR

SEQ ID NO: 41391 - protein, 10 aa, Artificial Sequence
  Peptide Derived from Human Papillomavirus
PVPGQYDATK

SEQ ID NO: 41392 - protein, 9 aa, Artificial Sequence
  Peptide Derived from Human Papillomavirus
QDIPKVSAY

SEQ ID NO: 41393 - protein, 11 aa, Artificial Sequence
  Peptide Derived from Human Papillomavirus
QDIPKVSAYQY

SEQ ID NO: 41394 - protein, 10 aa, Artificial Sequence
  Peptide Derived from Human Papillomavirus
QGDCPPLELK

SEQ ID NO: 41395 - protein, 10 aa, Artificial Sequence
  Peptide Derived from Human Papillomavirus
QGHNNGVCWH

SEQ ID NO: 41396 - protein, 10 aa, Artificial Sequence
  Peptide Derived from Human Papillomavirus
QLFARHFWNR

SEQ ID NO: 41397 - protein, 10 aa, Artificial Sequence
  Peptide Derived from Human Papillomavirus
QLFNKPYWLH

SEQ ID NO: 41398 - protein, 11 aa, Artificial Sequence
  Peptide Derived from Human Papillomavirus
QLFNKPYWLHK

SEQ ID NO: 41399 - protein, 9 aa, Artificial Sequence
  Peptide Derived from Human Papillomavirus
QSICKYPDY

SEQ ID NO: 41400 - protein, 8 aa, Artificial Sequence
  Peptide Derived from Human Papillomavirus
QSPVPGQY

SEQ ID NO: 41401 - protein, 9 aa, Artificial Sequence
  Peptide Derived from Human Papillomavirus
QSVAITCQK

SEQ ID NO: 41402 - protein, 8 aa, Artificial Sequence
  Peptide Derived from Human Papillomavirus
RDNVSVDY

SEQ ID NO: 41403 - protein, 9 aa, Artificial Sequence
  Peptide Derived from Human Papillomavirus
RDNVSVDYK

SEQ ID NO: 41404 - protein, 9 aa, Artificial Sequence
  Peptide Derived from Human Papillomavirus
RLLTVGNPY

SEQ ID NO: 41405 - protein, 11 aa, Artificial Sequence
  Peptide Derived from Human Papillomavirus
RLLTVGNPYFR

SEQ ID NO: 41406 - protein, 11 aa, Artificial Sequence
  Peptide Derived from Human Papillomavirus
RSAPSATTSSK

SEQ ID NO: 41407 - protein, 8 aa, Artificial Sequence
  Peptide Derived from Human Papillomavirus
RVLILHYH

SEQ ID NO: 41408 - protein, 9 aa, Artificial Sequence
  Peptide Derived from Human Papillomavirus
RVPAGGGNK

SEQ ID NO: 41409 - protein, 9 aa, Artificial Sequence
  Peptide Derived from Human Papillomavirus
RVQLPDPNK

SEQ ID NO: 41410 - protein, 8 aa, Artificial Sequence
  Peptide Derived from Human Papillomavirus
RVRVRARK

SEQ ID NO: 41411 - protein, 8 aa, Artificial Sequence
  Peptide Derived from Human Papillomavirus
RVVNTDDY

SEQ ID NO: 41412 - protein, 10 aa, Artificial Sequence
  Peptide Derived from Human Papillomavirus
SAPSATTSSK

SEQ ID NO: 41413 - protein, 10 aa, Artificial Sequence
  Peptide Derived from Human Papillomavirus
SATTSSKPAK

SEQ ID NO: 41414 - protein, 11 aa, Artificial Sequence
  Peptide Derived from Human Papillomavirus
SATTSSKPAKR

SEQ ID NO: 41415 - protein, 9 aa, Artificial Sequence
  Peptide Derived from Human Papillomavirus
SAYQYRVFR

SEQ ID NO: 41416 - protein, 8 aa, Artificial Sequence
  Peptide Derived from Human Papillomavirus
SDSQLFNK

SEQ ID NO: 41417 - protein, 10 aa, Artificial Sequence
  Peptide Derived from Human Papillomavirus
SDSQLFNKPY

SEQ ID NO: 41418 - protein, 8 aa, Artificial Sequence
  Peptide Derived from Human Papillomavirus
SGHPFYNK

SEQ ID NO: 41419 - protein, 8 aa, Artificial Sequence
  Peptide Derived from Human Papillomavirus
SICKYPDY

SEQ ID NO: 41420 - protein, 10 aa, Artificial Sequence
  Peptide Derived from Human Papillomavirus
SIFYHAGSSR

SEQ ID NO: 41421 - protein, 8 aa, Artificial Sequence
  Peptide Derived from Human Papillomavirus
SILVYMVH

SEQ ID NO: 41422 - protein, 9 aa, Artificial Sequence
  Peptide Derived from Human Papillomavirus
SIYNPETQR

SEQ ID NO: 41423 - protein, 11 aa, Artificial Sequence
  Peptide Derived from Human Papillomavirus
SLDLDQYPLGR

SEQ ID NO: 41424 - protein, 8 aa, Artificial Sequence
  Peptide Derived from Human Papillomavirus
SMFFCLRR

SEQ ID NO: 41425 - protein, 8 aa, Artificial Sequence
  Peptide Derived from Human Papillomavirus
SNVSEDVR

SEQ ID NO: 41426 - protein, 9 aa, Artificial Sequence
  Peptide Derived from Human Papillomavirus
SSKPAKRVR

SEQ ID NO: 41427 - protein, 11 aa, Artificial Sequence
  Peptide Derived from Human Papillomavirus
SSKPAKRVRVR

SEQ ID NO: 41428 - protein, 11 aa, Artificial Sequence
  Peptide Derived from Human Papillomavirus
SSRLLTVGNPY

SEQ ID NO: 41429 - protein, 10 aa, Artificial Sequence
  Peptide Derived from Human Papillomavirus
STQSPVPGQY

SEQ ID NO: 41430 - protein, 8 aa, Artificial Sequence
  Peptide Derived from Human Papillomavirus
SVAITCQK

SEQ ID NO: 41431 - protein, 11 aa, Artificial Sequence
  Peptide Derived from Human Papillomavirus
SVARVVNTDDY

SEQ ID NO: 41432 - protein, 9 aa, Artificial Sequence
  Peptide Derived from Human Papillomavirus
TADVMSYIH

SEQ ID NO: 41433 - protein, 11 aa, Artificial Sequence
  Peptide Derived from Human Papillomavirus
TITLTADVMSY

SEQ ID NO: 41434 - protein, 9 aa, Artificial Sequence
  Peptide Derived from Human Papillomavirus
TLTADVMSY

SEQ ID NO: 41435 - protein, 11 aa, Artificial Sequence
  Peptide Derived from Human Papillomavirus
TLTADVMSYIH

SEQ ID NO: 41436 - protein, 11 aa, Artificial Sequence
  Peptide Derived from Human Papillomavirus
TMGDTVPQSLY

SEQ ID NO: 41437 - protein, 9 aa, Artificial Sequence
  Peptide Derived from Human Papillomavirus
TSDSQLFNK

SEQ ID NO: 41438 - protein, 11 aa, Artificial Sequence
  Peptide Derived from Human Papillomavirus
TSDSQLFNKPY

SEQ ID NO: 41439 - protein, 11 aa, Artificial Sequence
  Peptide Derived from Human Papillomavirus
TSIFYHAGSSR

SEQ ID NO: 41440 - protein, 10 aa, Artificial Sequence
  Peptide Derived from Human Papillomavirus
TSIYNPETQR

SEQ ID NO: 41441 - protein, 8 aa, Artificial Sequence
  Peptide Derived from Human Papillomavirus
TSLVDTYR

SEQ ID NO: 41442 - protein, 9 aa, Artificial Sequence
  Peptide Derived from Human Papillomavirus
TSNVSEDVR

SEQ ID NO: 41443 - protein, 8 aa, Artificial Sequence
  Peptide Derived from Human Papillomavirus
TSSKPAKR

SEQ ID NO: 41444 - protein, 10 aa, Artificial Sequence
  Peptide Derived from Human Papillomavirus
TSSKPAKRVR

SEQ ID NO: 41445 - protein, 8 aa, Artificial Sequence
  Peptide Derived from Human Papillomavirus
TTSLVDTY

SEQ ID NO: 41446 - protein, 9 aa, Artificial Sequence
  Peptide Derived from Human Papillomavirus
TTSLVDTYR

SEQ ID NO: 41447 - protein, 8 aa, Artificial Sequence
  Peptide Derived from Human Papillomavirus
TTSSKPAK

SEQ ID NO: 41448 - protein, 9 aa, Artificial Sequence
  Peptide Derived from Human Papillomavirus
TTSSKPAKR

SEQ ID NO: 41449 - protein, 11 aa, Artificial Sequence
  Peptide Derived from Human Papillomavirus
TTSSKPAKRVR

SEQ ID NO: 41450 - protein, 8 aa, Artificial Sequence
  Peptide Derived from Human Papillomavirus
TVGNPYFR

SEQ ID NO: 41451 - protein, 9 aa, Artificial Sequence
  Peptide Derived from Human Papillomavirus
TVPQSLYIK

SEQ ID NO: 41452 - protein, 11 aa, Artificial Sequence
  Peptide Derived from Human Papillomavirus
TVYLPPPSVAR

SEQ ID NO: 41453 - protein, 10 aa, Artificial Sequence
  Peptide Derived from Human Papillomavirus
VARVVNTDDY

SEQ ID NO: 41454 - protein, 11 aa, Artificial Sequence
  Peptide Derived from Human Papillomavirus
VFRVQLPDPNK

SEQ ID NO: 41455 - protein, 9 aa, Artificial Sequence
  Peptide Derived from Human Papillomavirus
VGLSGHPFY

SEQ ID NO: 41456 - protein, 11 aa, Artificial Sequence
  Peptide Derived from Human Papillomavirus
VGLSGHPFYNK

SEQ ID NO: 41457 - protein, 10 aa, Artificial Sequence
  Peptide Derived from Human Papillomavirus
VSAYQYRVFR

SEQ ID NO: 41458 - protein, 8 aa, Artificial Sequence
  Peptide Derived from Human Papillomavirus
VTPTSIFY

SEQ ID NO: 41459 - protein, 9 aa, Artificial Sequence
  Peptide Derived from Human Papillomavirus
VTPTSIFYH

SEQ ID NO: 41460 - protein, 10 aa, Artificial Sequence
  Peptide Derived from Human Papillomavirus
VTSDSQLFNK

SEQ ID NO: 41461 - protein, 10 aa, Artificial Sequence
  Peptide Derived from Human Papillomavirus
WACAGVEIGR

SEQ ID NO: 41462 - protein, 8 aa, Artificial Sequence
  Peptide Derived from Human Papillomavirus
WAKGTACK

SEQ ID NO: 41463 - protein, 10 aa, Artificial Sequence
  Peptide Derived from Human Papillomavirus
WAKGTACKSR

SEQ ID NO: 41464 - protein, 8 aa, Artificial Sequence
  Peptide Derived from Human Papillomavirus
WLHKAQGH

SEQ ID NO: 41465 - protein, 8 aa, Artificial Sequence
  Peptide Derived from Human Papillomavirus
WNVDLKEK

SEQ ID NO: 41466 - protein, 9 aa, Artificial Sequence
  Peptide Derived from Human Papillomavirus
YDATKFKQY

SEQ ID NO: 41467 - protein, 11 aa, Artificial Sequence
  Peptide Derived from Human Papillomavirus
YDATKFKQYSR

SEQ ID NO: 41468 - protein, 11 aa, Artificial Sequence
  Peptide Derived from Human Papillomavirus
YFRVPAGGGNK

SEQ ID NO: 41469 - protein, 10 aa, Artificial Sequence
  Peptide Derived from Human Papillomavirus
YGDSMFFCLR

SEQ ID NO: 41470 - protein, 11 aa, Artificial Sequence
  Peptide Derived from Human Papillomavirus
YGDSMFFCLRR

SEQ ID NO: 41471 - protein, 8 aa, Artificial Sequence
  Peptide Derived from Human Papillomavirus
YGPLYHPR

SEQ ID NO: 41472 - protein, 9 aa, Artificial Sequence
  Peptide Derived from Human Papillomavirus
YLPPPSVAR

SEQ ID NO: 41473 - protein, 9 aa, Artificial Sequence
  Peptide Derived from Human Papillomavirus
YLQMSADPY

SEQ ID NO: 41474 - protein, 10 aa, Artificial Sequence
  Peptide Derived from Human Papillomavirus
YMVHIIICGH

SEQ ID NO: 41475 - protein, 11 aa, Artificial Sequence
  Peptide Derived from Human Papillomavirus
YMVHIIICGHY

SEQ ID NO: 41476 - protein, 11 aa, Artificial Sequence
  Peptide Derived from Human Papillomavirus
YNKLDDTESSH

SEQ ID NO: 41477 - protein, 8 aa, Artificial Sequence
  Peptide Derived from Human Papillomavirus
YSRHVEEY

SEQ ID NO: 41478 - protein, 8 aa, Artificial Sequence
  Peptide Derived from Human Papillomavirus
YTRVLILH

SEQ ID NO: 41479 - protein, 9 aa, Artificial Sequence
  Peptide Derived from Human Papillomavirus
YTRVLILHY

SEQ ID NO: 41480 - protein, 10 aa, Artificial Sequence
  Peptide Derived from Human Papillomavirus
YTRVLILHYH

SEQ ID NO: 41481 - protein, 9 aa, Artificial Sequence
  Peptide Derived from Human Papillomavirus
YVTPTSIFY

SEQ ID NO: 41482 - protein, 10 aa, Artificial Sequence
  Peptide Derived from Human Papillomavirus
YVTPTSIFYH

SEQ ID NO: 41483 - protein, 8 aa, Artificial Sequence
  Peptide Derived from Human Papillomavirus
AGPRLYSR

SEQ ID NO: 41484 - protein, 10 aa, Artificial Sequence
  Peptide Derived from Human Papillomavirus
AGPRLYSRAY

SEQ ID NO: 41485 - protein, 10 aa, Artificial Sequence
  Peptide Derived from Human Papillomavirus
ALTSRRGTVR

SEQ ID NO: 41486 - protein, 8 aa, Artificial Sequence
  Peptide Derived from Human Papillomavirus
ANPEFLTR

SEQ ID NO: 41487 - protein, 9 aa, Artificial Sequence
  Peptide Derived from Human Papillomavirus
ASTQYIGIH

SEQ ID NO: 41488 - protein, 8 aa, Artificial Sequence
  Peptide Derived from Human Papillomavirus
ASVTDLYK

SEQ ID NO: 41489 - protein, 11 aa, Artificial Sequence
  Peptide Derived from Human Papillomavirus
ASVTDLYKTCK

SEQ ID NO: 41490 - protein, 11 aa, Artificial Sequence
  Peptide Derived from Human Papillomavirus
ATEDNDLFDIY

SEQ ID NO: 41491 - protein, 9 aa, Artificial Sequence
  Peptide Derived from Human Papillomavirus
DFMDIIRLH

SEQ ID NO: 41492 - protein, 10 aa, Artificial Sequence
  Peptide Derived from Human Papillomavirus
DFMDIIRLHR

SEQ ID NO: 41493 - protein, 11 aa, Artificial Sequence
  Peptide Derived from Human Papillomavirus
DISPIAPSPEY

SEQ ID NO: 41494 - protein, 11 aa, Artificial Sequence
  Peptide Derived from Human Papillomavirus
DMDPAVPVPSR

SEQ ID NO: 41495 - protein, 8 aa, Artificial Sequence
  Peptide Derived from Human Papillomavirus
DNDLFDIY

SEQ ID NO: 41496 - protein, 9 aa, Artificial Sequence
  Peptide Derived from Human Papillomavirus
DSDFMDIIR

SEQ ID NO: 41497 - protein, 11 aa, Artificial Sequence
  Peptide Derived from Human Papillomavirus
DSDFMDIIRLH

SEQ ID NO: 41498 - protein, 11 aa, Artificial Sequence
  Peptide Derived from Human Papillomavirus
DSSVVTSGAPR

SEQ ID NO: 41499 - protein, 9 aa, Artificial Sequence
  Peptide Derived from Human Papillomavirus
DTTLTFDPR

SEQ ID NO: 41500 - protein, 9 aa, Artificial Sequence
  Peptide Derived from Human Papillomavirus
EDNDLFDIY

SEQ ID NO: 41501 - protein, 8 aa, Artificial Sequence
  Peptide Derived from Human Papillomavirus
EGTTLADK

SEQ ID NO: 41502 - protein, 8 aa, Artificial Sequence
  Peptide Derived from Human Papillomavirus
FIPKKRKR

SEQ ID NO: 41503 - protein, 11 aa, Artificial Sequence
  Peptide Derived from Human Papillomavirus
FIPKKRKRVPY

SEQ ID NO: 41504 - protein, 11 aa, Artificial Sequence
  Peptide Derived from Human Papillomavirus
FLTRPSSLITY

SEQ ID NO: 41505 - protein, 8 aa, Artificial Sequence
  Peptide Derived from Human Papillomavirus
FMDIIRLH

SEQ ID NO: 41506 - protein, 9 aa, Artificial Sequence
  Peptide Derived from Human Papillomavirus
FMDIIRLHR

SEQ ID NO: 41507 - protein, 11 aa, Artificial Sequence
  Peptide Derived from Human Papillomavirus
FTRSGTQIGAR

SEQ ID NO: 41508 - protein, 10 aa, Artificial Sequence
  Peptide Derived from Human Papillomavirus
FVGTPTSGTH

SEQ ID NO: 41509 - protein, 8 aa, Artificial Sequence
  Peptide Derived from Human Papillomavirus
GARVHFYH

SEQ ID NO: 41510 - protein, 11 aa, Artificial Sequence
  Peptide Derived from Human Papillomavirus
GIGTGSGTGGR

SEQ ID NO: 41511 - protein, 8 aa, Artificial Sequence
  Peptide Derived from Human Papillomavirus
GIHGTHYY

SEQ ID NO: 41512 - protein, 10 aa, Artificial Sequence
  Peptide Derived from Human Papillomavirus
GSGTGGRTGY

SEQ ID NO: 41513 - protein, 10 aa, Artificial Sequence
  Peptide Derived from Human Papillomavirus
GTCPPDVVPK

SEQ ID NO: 41514 - protein, 8 aa, Artificial Sequence
  Peptide Derived from Human Papillomavirus
GTGGRTGY

SEQ ID NO: 41515 - protein, 9 aa, Artificial Sequence
  Peptide Derived from Human Papillomavirus
GTGSGTGGR

SEQ ID NO: 41516 - protein, 10 aa, Artificial Sequence
  Peptide Derived from Human Papillomavirus
GTHYYLWPLY

SEQ ID NO: 41517 - protein, 11 aa, Artificial Sequence
  Peptide Derived from Human Papillomavirus
GTHYYLWPLYY

SEQ ID NO: 41518 - protein, 8 aa, Artificial Sequence
  Peptide Derived from Human Papillomavirus
GTPTSGTH

SEQ ID NO: 41519 - protein, 10 aa, Artificial Sequence
  Peptide Derived from Human Papillomavirus
GTPTSGTHGY

SEQ ID NO: 41520 - protein, 9 aa, Artificial Sequence
  Peptide Derived from Human Papillomavirus
GTQIGARVH

SEQ ID NO: 41521 - protein, 11 aa, Artificial Sequence
  Peptide Derived from Human Papillomavirus
GTQIGARVHFY

SEQ ID NO: 41522 - protein, 11 aa, Artificial Sequence
  Peptide Derived from Human Papillomavirus
GTVRFSRLGQR

SEQ ID NO: 41523 - protein, 11 aa, Artificial Sequence
  Peptide Derived from Human Papillomavirus
HGTHYYLWPLY

SEQ ID NO: 41524 - protein, 8 aa, Artificial Sequence
  Peptide Derived from Human Papillomavirus
IGARVHFY

SEQ ID NO: 41525 - protein, 9 aa, Artificial Sequence
  Peptide Derived from Human Papillomavirus
IGARVHFYH

SEQ ID NO: 41526 - protein, 8 aa, Artificial Sequence
  Peptide Derived from Human Papillomavirus
IGIHGTHY

SEQ ID NO: 41527 - protein, 9 aa, Artificial Sequence
  Peptide Derived from Human Papillomavirus
IGIHGTHYY

SEQ ID NO: 41528 - protein, 10 aa, Artificial Sequence
  Peptide Derived from Human Papillomavirus
IGTGSGTGGR

SEQ ID NO: 41529 - protein, 10 aa, Artificial Sequence
  Peptide Derived from Human Papillomavirus
ISPIAPSPEY

SEQ ID NO: 41530 - protein, 10 aa, Artificial Sequence
  Peptide Derived from Human Papillomavirus
ISSTPLPTVR

SEQ ID NO: 41531 - protein, 11 aa, Artificial Sequence
  Peptide Derived from Human Papillomavirus
ISSTPLPTVRR

SEQ ID NO: 41532 - protein, 10 aa, Artificial Sequence
  Peptide Derived from Human Papillomavirus
KVEGTTLADK

SEQ ID NO: 41533 - protein, 10 aa, Artificial Sequence
  Peptide Derived from Human Papillomavirus
LGQRATMFTR

SEQ ID NO: 41534 - protein, 10 aa, Artificial Sequence
  Peptide Derived from Human Papillomavirus
LTRPSSLITY

SEQ ID NO: 41535 - protein, 9 aa, Artificial Sequence
  Peptide Derived from Human Papillomavirus
LTSRRGTVR

SEQ ID NO: 41536 - protein, 10 aa, Artificial Sequence
  Peptide Derived from Human Papillomavirus
LTSSWDVPVY

SEQ ID NO: 41537 - protein, 8 aa, Artificial Sequence
  Peptide Derived from Human Papillomavirus
MDIIRLHR

SEQ ID NO: 41538 - protein, 10 aa, Artificial Sequence
  Peptide Derived from Human Papillomavirus
MDPAVPVPSR

SEQ ID NO: 41539 - protein, 8 aa, Artificial Sequence
  Peptide Derived from Human Papillomavirus
MVSHRAAR

SEQ ID NO: 41540 - protein, 9 aa, Artificial Sequence
  Peptide Derived from Human Papillomavirus
MVSHRAARR

SEQ ID NO: 41541 - protein, 10 aa, Artificial Sequence
  Peptide Derived from Human Papillomavirus
MVSHRAARRK

SEQ ID NO: 41542 - protein, 11 aa, Artificial Sequence
  Peptide Derived from Human Papillomavirus
MVSHRAARRKR

SEQ ID NO: 41543 - protein, 10 aa, Artificial Sequence
  Peptide Derived from Human Papillomavirus
NTVVDVGPTR

SEQ ID NO: 41544 - protein, 11 aa, Artificial Sequence
  Peptide Derived from Human Papillomavirus
PALTSRRGTVR

SEQ ID NO: 41545 - protein, 10 aa, Artificial Sequence
  Peptide Derived from Human Papillomavirus
PASTQYIGIH

SEQ ID NO: 41546 - protein, 8 aa, Artificial Sequence
  Peptide Derived from Human Papillomavirus
PAVPVPSR

SEQ ID NO: 41547 - protein, 10 aa, Artificial Sequence
  Peptide Derived from Human Papillomavirus
PDSDFMDIIR

SEQ ID NO: 41548 - protein, 8 aa, Artificial Sequence
  Peptide Derived from Human Papillomavirus
PIAPSPEY

SEQ ID NO: 41549 - protein, 11 aa, Artificial Sequence
  Peptide Derived from Human Papillomavirus
PISSTPLPTVR

SEQ ID NO: 41550 - protein, 11 aa, Artificial Sequence
  Peptide Derived from Human Papillomavirus
PLTSSWDVPVY

SEQ ID NO: 41551 - protein, 8 aa, Artificial Sequence
  Peptide Derived from Human Papillomavirus
PLYYFIPK

SEQ ID NO: 41552 - protein, 9 aa, Artificial Sequence
  Peptide Derived from Human Papillomavirus
PLYYFIPKK

SEQ ID NO: 41553 - protein, 10 aa, Artificial Sequence
  Peptide Derived from Human Papillomavirus
PLYYFIPKKR

SEQ ID NO: 41554 - protein, 11 aa, Artificial Sequence
  Peptide Derived from Human Papillomavirus
PLYYFIPKKRK

SEQ ID NO: 41555 - protein, 9 aa, Artificial Sequence
  Peptide Derived from Human Papillomavirus
PTAPASTQY

SEQ ID NO: 41556 - protein, 9 aa, Artificial Sequence
  Peptide Derived from Human Papillomavirus
PTISSASSY

SEQ ID NO: 41557 - protein, 8 aa, Artificial Sequence
  Peptide Derived from Human Papillomavirus
PTSGTHGY

SEQ ID NO: 41558 - protein, 10 aa, Artificial Sequence
  Peptide Derived from Human Papillomavirus
PTVRRVAGPR

SEQ ID NO: 41559 - protein, 11 aa, Artificial Sequence
  Peptide Derived from Human Papillomavirus
PVDTTLTFDPR

SEQ ID NO: 41560 - protein, 9 aa, Artificial Sequence
  Peptide Derived from Human Papillomavirus
QIGARVHFY

SEQ ID NO: 41561 - protein, 10 aa, Artificial Sequence
  Peptide Derived from Human Papillomavirus
QIGARVHFYH

SEQ ID NO: 41562 - protein, 8 aa, Artificial Sequence
  Peptide Derived from Human Papillomavirus
RASVTDLY

SEQ ID NO: 41563 - protein, 9 aa, Artificial Sequence
  Peptide Derived from Human Papillomavirus
RASVTDLYK

SEQ ID NO: 41564 - protein, 8 aa, Artificial Sequence
  Peptide Derived from Human Papillomavirus
RFSRLGQR

SEQ ID NO: 41565 - protein, 8 aa, Artificial Sequence
  Peptide Derived from Human Papillomavirus
RGTVRFSR

SEQ ID NO: 41566 - protein, 11 aa, Artificial Sequence
  Peptide Derived from Human Papillomavirus
RLGQRATMFTR

SEQ ID NO: 41567 - protein, 10 aa, Artificial Sequence
  Peptide Derived from Human Papillomavirus
RLHRPALTSR

SEQ ID NO: 41568 - protein, 11 aa, Artificial Sequence
  Peptide Derived from Human Papillomavirus
RLHRPALTSRR

SEQ ID NO: 41569 - protein, 9 aa, Artificial Sequence
  Peptide Derived from Human Papillomavirus
RSGTQIGAR

SEQ ID NO: 41570 - protein, 11 aa, Artificial Sequence
  Peptide Derived from Human Papillomavirus
RSGTQIGARVH

SEQ ID NO: 41571 - protein, 10 aa, Artificial Sequence
  Peptide Derived from Human Papillomavirus
RSTTSFAFFK

SEQ ID NO: 41572 - protein, 11 aa, Artificial Sequence
  Peptide Derived from Human Papillomavirus
RSTTSFAFFKY

SEQ ID NO: 41573 - protein, 10 aa, Artificial Sequence
  Peptide Derived from Human Papillomavirus
RTGYIPLGGR

SEQ ID NO: 41574 - protein, 8 aa, Artificial Sequence
  Peptide Derived from Human Papillomavirus
RVAGPRLY

SEQ ID NO: 41575 - protein, 10 aa, Artificial Sequence
  Peptide Derived from Human Papillomavirus
RVAGPRLYSR

SEQ ID NO: 41576 - protein, 8 aa, Artificial Sequence
  Peptide Derived from Human Papillomavirus
SDFMDIIR

SEQ ID NO: 41577 - protein, 10 aa, Artificial Sequence
  Peptide Derived from Human Papillomavirus
SDFMDIIRLH

SEQ ID NO: 41578 - protein, 11 aa, Artificial Sequence
  Peptide Derived from Human Papillomavirus
SDFMDIIRLHR

SEQ ID NO: 41579 - protein, 11 aa, Artificial Sequence
  Peptide Derived from Human Papillomavirus
SGTCPPDVVPK

SEQ ID NO: 41580 - protein, 9 aa, Artificial Sequence
  Peptide Derived from Human Papillomavirus
SGTGGRTGY

SEQ ID NO: 41581 - protein, 8 aa, Artificial Sequence
  Peptide Derived from Human Papillomavirus
SGTQIGAR

SEQ ID NO: 41582 - protein, 10 aa, Artificial Sequence
  Peptide Derived from Human Papillomavirus
SGTQIGARVH

SEQ ID NO: 41583 - protein, 11 aa, Artificial Sequence
  Peptide Derived from Human Papillomavirus
SNTVVDVGPTR

SEQ ID NO: 41584 - protein, 9 aa, Artificial Sequence
  Peptide Derived from Human Papillomavirus
SSTPLPTVR

SEQ ID NO: 41585 - protein, 10 aa, Artificial Sequence
  Peptide Derived from Human Papillomavirus
SSTPLPTVRR

SEQ ID NO: 41586 - protein, 10 aa, Artificial Sequence
  Peptide Derived from Human Papillomavirus
SSVVTSGAPR

SEQ ID NO: 41587 - protein, 8 aa, Artificial Sequence
  Peptide Derived from Human Papillomavirus
SSWDVPVY

SEQ ID NO: 41588 - protein, 8 aa, Artificial Sequence
  Peptide Derived from Human Papillomavirus
STPLPTVR

SEQ ID NO: 41589 - protein, 9 aa, Artificial Sequence
  Peptide Derived from Human Papillomavirus
STPLPTVRR

SEQ ID NO: 41590 - protein, 8 aa, Artificial Sequence
  Peptide Derived from Human Papillomavirus
STQYIGIH

SEQ ID NO: 41591 - protein, 11 aa, Artificial Sequence
  Peptide Derived from Human Papillomavirus
STQYIGIHGTH

SEQ ID NO: 41592 - protein, 9 aa, Artificial Sequence
  Peptide Derived from Human Papillomavirus
STTSFAFFK

SEQ ID NO: 41593 - protein, 10 aa, Artificial Sequence
  Peptide Derived from Human Papillomavirus
STTSFAFFKY

SEQ ID NO: 41594 - protein, 10 aa, Artificial Sequence
  Peptide Derived from Human Papillomavirus
SVANPEFLTR

SEQ ID NO: 41595 - protein, 10 aa, Artificial Sequence
  Peptide Derived from Human Papillomavirus
SVTDLYKTCK

SEQ ID NO: 41596 - protein, 9 aa, Artificial Sequence
  Peptide Derived from Human Papillomavirus
SVVTSGAPR

SEQ ID NO: 41597 - protein, 8 aa, Artificial Sequence
  Peptide Derived from Human Papillomavirus
TAPASTQY

SEQ ID NO: 41598 - protein, 9 aa, Artificial Sequence
  Peptide Derived from Human Papillomavirus
TCPPDVVPK

SEQ ID NO: 41599 - protein, 8 aa, Artificial Sequence
  Peptide Derived from Human Papillomavirus
TDLYKTCK

SEQ ID NO: 41600 - protein, 8 aa, Artificial Sequence
  Peptide Derived from Human Papillomavirus
TGSGTGGR

SEQ ID NO: 41601 - protein, 11 aa, Artificial Sequence
  Peptide Derived from Human Papillomavirus
TGSGTGGRTGY

SEQ ID NO: 41602 - protein, 9 aa, Artificial Sequence
  Peptide Derived from Human Papillomavirus
TGYIPLGGR

SEQ ID NO: 41603 - protein, 8 aa, Artificial Sequence
  Peptide Derived from Human Papillomavirus
TISSASSY

SEQ ID NO: 41604 - protein, 8 aa, Artificial Sequence
  Peptide Derived from Human Papillomavirus
TSFAFFKY

SEQ ID NO: 41605 - protein, 8 aa, Artificial Sequence
  Peptide Derived from Human Papillomavirus
TSRRGTVR

SEQ ID NO: 41606 - protein, 11 aa, Artificial Sequence
  Peptide Derived from Human Papillomavirus
TSRRGTVRFSR

SEQ ID NO: 41607 - protein, 9 aa, Artificial Sequence
  Peptide Derived from Human Papillomavirus
TSSWDVPVY

SEQ ID NO: 41608 - protein, 8 aa, Artificial Sequence
  Peptide Derived from Human Papillomavirus
TTLTFDPR

SEQ ID NO: 41609 - protein, 8 aa, Artificial Sequence
  Peptide Derived from Human Papillomavirus
TTSFAFFK

SEQ ID NO: 41610 - protein, 9 aa, Artificial Sequence
  Peptide Derived from Human Papillomavirus
TTSFAFFKY

SEQ ID NO: 41611 - protein, 10 aa, Artificial Sequence
  Peptide Derived from Human Papillomavirus
TVRFSRLGQR

SEQ ID NO: 41612 - protein, 9 aa, Artificial Sequence
  Peptide Derived from Human Papillomavirus
TVRRVAGPR

SEQ ID NO: 41613 - protein, 11 aa, Artificial Sequence
  Peptide Derived from Human Papillomavirus
TVRRVAGPRLY

SEQ ID NO: 41614 - protein, 9 aa, Artificial Sequence
  Peptide Derived from Human Papillomavirus
TVVDVGPTR

SEQ ID NO: 41615 - protein, 9 aa, Artificial Sequence
  Peptide Derived from Human Papillomavirus
VAGPRLYSR

SEQ ID NO: 41616 - protein, 11 aa, Artificial Sequence
  Peptide Derived from Human Papillomavirus
VAGPRLYSRAY

SEQ ID NO: 41617 - protein, 9 aa, Artificial Sequence
  Peptide Derived from Human Papillomavirus
VANPEFLTR

SEQ ID NO: 41618 - protein, 10 aa, Artificial Sequence
  Peptide Derived from Human Papillomavirus
VDTTLTFDPR

SEQ ID NO: 41619 - protein, 11 aa, Artificial Sequence
  Peptide Derived from Human Papillomavirus
VFVGTPTSGTH

SEQ ID NO: 41620 - protein, 9 aa, Artificial Sequence
  Peptide Derived from Human Papillomavirus
VGTPTSGTH

SEQ ID NO: 41621 - protein, 11 aa, Artificial Sequence
  Peptide Derived from Human Papillomavirus
VGTPTSGTHGY

SEQ ID NO: 41622 - protein, 8 aa, Artificial Sequence
  Peptide Derived from Human Papillomavirus
VSHRAARR

SEQ ID NO: 41623 - protein, 9 aa, Artificial Sequence
  Peptide Derived from Human Papillomavirus
VSHRAARRK

SEQ ID NO: 41624 - protein, 10 aa, Artificial Sequence
  Peptide Derived from Human Papillomavirus
VSHRAARRKR

SEQ ID NO: 41625 - protein, 11 aa, Artificial Sequence
  Peptide Derived from Human Papillomavirus
VSPTAPASTQY

SEQ ID NO: 41626 - protein, 11 aa, Artificial Sequence
  Peptide Derived from Human Papillomavirus
VSVANPEFLTR

SEQ ID NO: 41627 - protein, 9 aa, Artificial Sequence
  Peptide Derived from Human Papillomavirus
VTDLYKTCK

SEQ ID NO: 41628 - protein, 8 aa, Artificial Sequence
  Peptide Derived from Human Papillomavirus
VVDVGPTR

SEQ ID NO: 41629 - protein, 8 aa, Artificial Sequence
  Peptide Derived from Human Papillomavirus
VVTSGAPR

SEQ ID NO: 41630 - protein, 8 aa, Artificial Sequence
  Peptide Derived from Human Papillomavirus
YFIPKKRK

SEQ ID NO: 41631 - protein, 9 aa, Artificial Sequence
  Peptide Derived from Human Papillomavirus
YFIPKKRKR

SEQ ID NO: 41632 - protein, 8 aa, Artificial Sequence
  Peptide Derived from Human Papillomavirus
YIGIHGTH

SEQ ID NO: 41633 - protein, 9 aa, Artificial Sequence
  Peptide Derived from Human Papillomavirus
YIGIHGTHY

SEQ ID NO: 41634 - protein, 10 aa, Artificial Sequence
  Peptide Derived from Human Papillomavirus
YIGIHGTHYY

SEQ ID NO: 41635 - protein, 11 aa, Artificial Sequence
  Peptide Derived from Human Papillomavirus
YLWPLYYFIPK

SEQ ID NO: 41636 - protein, 11 aa, Artificial Sequence
  Peptide Derived from Human Papillomavirus
YSPTISSASSY

SEQ ID NO: 41637 - protein, 8 aa, Artificial Sequence
  Peptide Derived from Human Papillomavirus
AAALYWYR

SEQ ID NO: 41638 - protein, 8 aa, Artificial Sequence
  Peptide Derived from Human Papillomavirus
AAMLGKFK

SEQ ID NO: 41639 - protein, 11 aa, Artificial Sequence
  Peptide Derived from Human Papillomavirus
AAMLGKFKELY

SEQ ID NO: 41640 - protein, 10 aa, Artificial Sequence
  Peptide Derived from Human Papillomavirus
AFLKSNSQAK

SEQ ID NO: 41641 - protein, 9 aa, Artificial Sequence
  Peptide Derived from Human Papillomavirus
AGKDDRWPY

SEQ ID NO: 41642 - protein, 11 aa, Artificial Sequence
  Peptide Derived from Human Papillomavirus
AGKDDRWPYLH

SEQ ID NO: 41643 - protein, 9 aa, Artificial Sequence
  Peptide Derived from Human Papillomavirus
AICIENNSK

SEQ ID NO: 41644 - protein, 11 aa, Artificial Sequence
  Peptide Derived from Human Papillomavirus
ALFHAQEAEEH

SEQ ID NO: 41645 - protein, 11 aa, Artificial Sequence
  Peptide Derived from Human Papillomavirus
ALKLFLKGVPK

SEQ ID NO: 41646 - protein, 10 aa, Artificial Sequence
  Peptide Derived from Human Papillomavirus
AMLGKFKELY

SEQ ID NO: 41647 - protein, 8 aa, Artificial Sequence
  Peptide Derived from Human Papillomavirus
ATTPCWHY

SEQ ID NO: 41648 - protein, 8 aa, Artificial Sequence
  Peptide Derived from Human Papillomavirus
AVQVLKRK

SEQ ID NO: 41649 - protein, 9 aa, Artificial Sequence
  Peptide Derived from Human Papillomavirus
AVQVLKRKY

SEQ ID NO: 41650 - protein, 11 aa, Artificial Sequence
  Peptide Derived from Human Papillomavirus
CAFLKSNSQAK

SEQ ID NO: 41651 - protein, 10 aa, Artificial Sequence
  Peptide Derived from Human Papillomavirus
CAKNRITIEK

SEQ ID NO: 41652 - protein, 11 aa, Artificial Sequence
  Peptide Derived from Human Papillomavirus
CDKVSDEGDWR

SEQ ID NO: 41653 - protein, 8 aa, Artificial Sequence
  Peptide Derived from Human Papillomavirus
CGTMCRHY

SEQ ID NO: 41654 - protein, 9 aa, Artificial Sequence
  Peptide Derived from Human Papillomavirus
CGTMCRHYK

SEQ ID NO: 41655 - protein, 10 aa, Artificial Sequence
  Peptide Derived from Human Papillomavirus
CGTMCRHYKR

SEQ ID NO: 41656 - protein, 10 aa, Artificial Sequence
  Peptide Derived from Human Papillomavirus
CIENNSKTAK

SEQ ID NO: 41657 - protein, 11 aa, Artificial Sequence
  Peptide Derived from Human Papillomavirus
CIENNSKTAKR

SEQ ID NO: 41658 - protein, 9 aa, Artificial Sequence
  Peptide Derived from Human Papillomavirus
CIISYANSK

SEQ ID NO: 41659 - protein, 11 aa, Artificial Sequence
  Peptide Derived from Human Papillomavirus
CIISYANSKSH

SEQ ID NO: 41660 - protein, 8 aa, Artificial Sequence
  Peptide Derived from Human Papillomavirus
CMLIQPPK

SEQ ID NO: 41661 - protein, 10 aa, Artificial Sequence
  Peptide Derived from Human Papillomavirus
CMLIQPPKLR

SEQ ID NO: 41662 - protein, 8 aa, Artificial Sequence
  Peptide Derived from Human Papillomavirus
CNGSDGTH

SEQ ID NO: 41663 - protein, 11 aa, Artificial Sequence
  Peptide Derived from Human Papillomavirus
CNGSDGTHSER

SEQ ID NO: 41664 - protein, 9 aa, Artificial Sequence
  Peptide Derived from Human Papillomavirus
CVDYNISPR

SEQ ID NO: 41665 - protein, 11 aa, Artificial Sequence
  Peptide Derived from Human Papillomavirus
CVDYNISPRLK

SEQ ID NO: 41666 - protein, 8 aa, Artificial Sequence
  Peptide Derived from Human Papillomavirus
CVSGQNIR

SEQ ID NO: 41667 - protein, 8 aa, Artificial Sequence
  Peptide Derived from Human Papillomavirus
DATTPCWH

SEQ ID NO: 41668 - protein, 9 aa, Artificial Sequence
  Peptide Derived from Human Papillomavirus
DATTPCWHY

SEQ ID NO: 41669 - protein, 8 aa, Artificial Sequence
  Peptide Derived from Human Papillomavirus
DCGTMCRH

SEQ ID NO: 41670 - protein, 9 aa, Artificial Sequence
  Peptide Derived from Human Papillomavirus
DCGTMCRHY

SEQ ID NO: 41671 - protein, 10 aa, Artificial Sequence
  Peptide Derived from Human Papillomavirus
DCGTMCRHYK

SEQ ID NO: 41672 - protein, 11 aa, Artificial Sequence
  Peptide Derived from Human Papillomavirus
DCGTMCRHYKR

SEQ ID NO: 41673 - protein, 9 aa, Artificial Sequence
  Peptide Derived from Human Papillomavirus
DDATTPCWH

SEQ ID NO: 41674 - protein, 10 aa, Artificial Sequence
  Peptide Derived from Human Papillomavirus
DDATTPCWHY

SEQ ID NO: 41675 - protein, 8 aa, Artificial Sequence
  Peptide Derived from Human Papillomavirus
DDRWPYLH

SEQ ID NO: 41676 - protein, 10 aa, Artificial Sequence
  Peptide Derived from Human Papillomavirus
DDRWPYLHSR

SEQ ID NO: 41677 - protein, 8 aa, Artificial Sequence
  Peptide Derived from Human Papillomavirus
DDSEIAYK

SEQ ID NO: 41678 - protein, 9 aa, Artificial Sequence
  Peptide Derived from Human Papillomavirus
DDSEIAYKY

SEQ ID NO: 41679 - protein, 9 aa, Artificial Sequence
  Peptide Derived from Human Papillomavirus
DFIDNCNVY

SEQ ID NO: 41680 - protein, 9 aa, Artificial Sequence
  Peptide Derived from Human Papillomavirus
DGDSFSTFK

SEQ ID NO: 41681 - protein, 10 aa, Artificial Sequence
  Peptide Derived from Human Papillomavirus
DGNPVSIDVK

SEQ ID NO: 41682 - protein, 11 aa, Artificial Sequence
  Peptide Derived from Human Papillomavirus
DGNPVSIDVKH

SEQ ID NO: 41683 - protein, 8 aa, Artificial Sequence
  Peptide Derived from Human Papillomavirus
DISSCVDY

SEQ ID NO: 41684 - protein, 8 aa, Artificial Sequence
  Peptide Derived from Human Papillomavirus
DIVKFLRY

SEQ ID NO: 41685 - protein, 10 aa, Artificial Sequence
  Peptide Derived from Human Papillomavirus
DLSQMVQWAY

SEQ ID NO: 41686 - protein, 11 aa, Artificial Sequence
  Peptide Derived from Human Papillomavirus
DSDSNACAFLK

SEQ ID NO: 41687 - protein, 8 aa, Artificial Sequence
  Peptide Derived from Human Papillomavirus
DSEIAYKY

SEQ ID NO: 41688 - protein, 9 aa, Artificial Sequence
  Peptide Derived from Human Papillomavirus
DSNACAFLK

SEQ ID NO: 41689 - protein, 11 aa, Artificial Sequence
  Peptide Derived from Human Papillomavirus
DVKHKALMQLK

SEQ ID NO: 41690 - protein, 10 aa, Artificial Sequence
  Peptide Derived from Human Papillomavirus
DVMDDSEIAY

SEQ ID NO: 41691 - protein, 11 aa, Artificial Sequence
  Peptide Derived from Human Papillomavirus
DVMDDSEIAYK

SEQ ID NO: 41692 - protein, 10 aa, Artificial Sequence
  Peptide Derived from Human Papillomavirus
EAETAQALFH

SEQ ID NO: 41693 - protein, 8 aa, Artificial Sequence
  Peptide Derived from Human Papillomavirus
EAVQVLKR

SEQ ID NO: 41694 - protein, 9 aa, Artificial Sequence
  Peptide Derived from Human Papillomavirus
EAVQVLKRK

SEQ ID NO: 41695 - protein, 10 aa, Artificial Sequence
  Peptide Derived from Human Papillomavirus
EAVQVLKRKY

SEQ ID NO: 41696 - protein, 10 aa, Artificial Sequence
  Peptide Derived from Human Papillomavirus
EFVSFLSALK

SEQ ID NO: 41697 - protein, 9 aa, Artificial Sequence
  Peptide Derived from Human Papillomavirus
EGDWRDIVK

SEQ ID NO: 41698 - protein, 10 aa, Artificial Sequence
  Peptide Derived from Human Papillomavirus
EGFKTLLQPY

SEQ ID NO: 41699 - protein, 10 aa, Artificial Sequence
  Peptide Derived from Human Papillomavirus
EGTGCNGWFY

SEQ ID NO: 41700 - protein, 10 aa, Artificial Sequence
  Peptide Derived from Human Papillomavirus
ELIRPFQSNK

SEQ ID NO: 41701 - protein, 8 aa, Artificial Sequence
  Peptide Derived from Human Papillomavirus
ELSDKNWK

SEQ ID NO: 41702 - protein, 11 aa, Artificial Sequence
  Peptide Derived from Human Papillomavirus
ENDGDSFSTFK

SEQ ID NO: 41703 - protein, 8 aa, Artificial Sequence
  Peptide Derived from Human Papillomavirus
ENNSKTAK

SEQ ID NO: 41704 - protein, 9 aa, Artificial Sequence
  Peptide Derived from Human Papillomavirus
ENNSKTAKR

SEQ ID NO: 41705 - protein, 10 aa, Artificial Sequence
  Peptide Derived from Human Papillomavirus
ENNSKTAKRR

SEQ ID NO: 41706 - protein, 8 aa, Artificial Sequence
  Peptide Derived from Human Papillomavirus
ETAQALFH

SEQ ID NO: 41707 - protein, 8 aa, Artificial Sequence
  Peptide Derived from Human Papillomavirus
ETPEWIER

SEQ ID NO: 41708 - protein, 9 aa, Artificial Sequence
  Peptide Derived from Human Papillomavirus
FDKNGNPVY

SEQ ID NO: 41709 - protein, 11 aa, Artificial Sequence
  Peptide Derived from Human Papillomavirus
FDLSQMVQWAY

SEQ ID NO: 41710 - protein, 8 aa, Artificial Sequence
  Peptide Derived from Human Papillomavirus
FFSRTWCR

SEQ ID NO: 41711 - protein, 8 aa, Artificial Sequence
  Peptide Derived from Human Papillomavirus
FIDNCNVY

SEQ ID NO: 41712 - protein, 8 aa, Artificial Sequence
  Peptide Derived from Human Papillomavirus
FLKGVPKK

SEQ ID NO: 41713 - protein, 9 aa, Artificial Sequence
  Peptide Derived from Human Papillomavirus
FLKSNSQAK

SEQ ID NO: 41714 - protein, 9 aa, Artificial Sequence
  Peptide Derived from Human Papillomavirus
FLQGCIISY

SEQ ID NO: 41715 - protein, 10 aa, Artificial Sequence
  Peptide Derived from Human Papillomavirus
FLSALKLFLK

SEQ ID NO: 41716 - protein, 11 aa, Artificial Sequence
  Peptide Derived from Human Papillomavirus
FSRTWCRLNLH

SEQ ID NO: 41717 - protein, 11 aa, Artificial Sequence
  Peptide Derived from Human Papillomavirus
FTFPNPFPFDK

SEQ ID NO: 41718 - protein, 9 aa, Artificial Sequence
  Peptide Derived from Human Papillomavirus
FVSFLSALK

SEQ ID NO: 41719 - protein, 9 aa, Artificial Sequence
  Peptide Derived from Human Papillomavirus
GAPNTGKSY

SEQ ID NO: 41720 - protein, 10 aa, Artificial Sequence
  Peptide Derived from Human Papillomavirus
GCIISYANSK

SEQ ID NO: 41721 - protein, 8 aa, Artificial Sequence
  Peptide Derived from Human Papillomavirus
GDSFSTFK

SEQ ID NO: 41722 - protein, 8 aa, Artificial Sequence
  Peptide Derived from Human Papillomavirus
GDWRDIVK

SEQ ID NO: 41723 - protein, 11 aa, Artificial Sequence
  Peptide Derived from Human Papillomavirus
GDWRDIVKFLR

SEQ ID NO: 41724 - protein, 9 aa, Artificial Sequence
  Peptide Derived from Human Papillomavirus
GFKTLLQPY

SEQ ID NO: 41725 - protein, 9 aa, Artificial Sequence
  Peptide Derived from Human Papillomavirus
GMSNISDVY

SEQ ID NO: 41726 - protein, 9 aa, Artificial Sequence
  Peptide Derived from Human Papillomavirus
GMVMLMLVR

SEQ ID NO: 41727 - protein, 11 aa, Artificial Sequence
  Peptide Derived from Human Papillomavirus
GMVMLMLVRFK

SEQ ID NO: 41728 - protein, 9 aa, Artificial Sequence
  Peptide Derived from Human Papillomavirus
GNPVSIDVK

SEQ ID NO: 41729 - protein, 10 aa, Artificial Sequence
  Peptide Derived from Human Papillomavirus
GNPVSIDVKH

SEQ ID NO: 41730 - protein, 11 aa, Artificial Sequence
  Peptide Derived from Human Papillomavirus
GNPVSIDVKHK

SEQ ID NO: 41731 - protein, 10 aa, Artificial Sequence
  Peptide Derived from Human Papillomavirus
GNPVYELSDK

SEQ ID NO: 41732 - protein, 9 aa, Artificial Sequence
  Peptide Derived from Human Papillomavirus
GSDGTHSER

SEQ ID NO: 41733 - protein, 9 aa, Artificial Sequence
  Peptide Derived from Human Papillomavirus
GTGCNGWFY

SEQ ID NO: 41734 - protein, 8 aa, Artificial Sequence
  Peptide Derived from Human Papillomavirus
GTMCRHYK

SEQ ID NO: 41735 - protein, 9 aa, Artificial Sequence
  Peptide Derived from Human Papillomavirus
GTMCRHYKR

SEQ ID NO: 41736 - protein, 8 aa, Artificial Sequence
  Peptide Derived from Human Papillomavirus
GTVAEGFK

SEQ ID NO: 41737 - protein, 11 aa, Artificial Sequence
  Peptide Derived from Human Papillomavirus
GVPKKNCILIH

SEQ ID NO: 41738 - protein, 9 aa, Artificial Sequence
  Peptide Derived from Human Papillomavirus
GVSFMELIR

SEQ ID NO: 41739 - protein, 11 aa, Artificial Sequence
  Peptide Derived from Human Papillomavirus
GVTGTVAEGFK

SEQ ID NO: 41740 - protein, 9 aa, Artificial Sequence
  Peptide Derived from Human Papillomavirus
HAEAVQVLK

SEQ ID NO: 41741 - protein, 10 aa, Artificial Sequence
  Peptide Derived from Human Papillomavirus
HAEAVQVLKR

SEQ ID NO: 41742 - protein, 11 aa, Artificial Sequence
  Peptide Derived from Human Papillomavirus
HAEAVQVLKRK

SEQ ID NO: 41743 - protein, 8 aa, Artificial Sequence
  Peptide Derived from Human Papillomavirus
HAQEAEEH

SEQ ID NO: 41744 - protein, 11 aa, Artificial Sequence
  Peptide Derived from Human Papillomavirus
HFWLQPLADAK

SEQ ID NO: 41745 - protein, 8 aa, Artificial Sequence
  Peptide Derived from Human Papillomavirus
HGAPNTGK

SEQ ID NO: 41746 - protein, 10 aa, Artificial Sequence
  Peptide Derived from Human Papillomavirus
HGAPNTGKSY

SEQ ID NO: 41747 - protein, 11 aa, Artificial Sequence
  Peptide Derived from Human Papillomavirus
HSERENETPTR

SEQ ID NO: 41748 - protein, 8 aa, Artificial Sequence
  Peptide Derived from Human Papillomavirus
ICIENNSK

SEQ ID NO: 41749 - protein, 11 aa, Artificial Sequence
  Peptide Derived from Human Papillomavirus
ICIENNSKTAK

SEQ ID NO: 41750 - protein, 8 aa, Artificial Sequence
  Peptide Derived from Human Papillomavirus
IISYANSK

SEQ ID NO: 41751 - protein, 10 aa, Artificial Sequence
  Peptide Derived from Human Papillomavirus
IISYANSKSH

SEQ ID NO: 41752 - protein, 11 aa, Artificial Sequence
  Peptide Derived from Human Papillomavirus
ILIHGAPNTGK

SEQ ID NO: 41753 - protein, 11 aa, Artificial Sequence
  Peptide Derived from Human Papillomavirus
ILQVLKTSNGK

SEQ ID NO: 41754 - protein, 8 aa, Artificial Sequence
  Peptide Derived from Human Papillomavirus
INAGKDDR

SEQ ID NO: 41755 - protein, 11 aa, Artificial Sequence
  Peptide Derived from Human Papillomavirus
INAGKDDRWPY

SEQ ID NO: 41756 - protein, 11 aa, Artificial Sequence
  Peptide Derived from Human Papillomavirus
ISFLQGCIISY

SEQ ID NO: 41757 - protein, 9 aa, Artificial Sequence
  Peptide Derived from Human Papillomavirus
ISYANSKSH

SEQ ID NO: 41758 - protein, 9 aa, Artificial Sequence
  Peptide Derived from Human Papillomavirus
ITIEKLLEK

SEQ ID NO: 41759 - protein, 9 aa, Artificial Sequence
  Peptide Derived from Human Papillomavirus
ITSNINAGK

SEQ ID NO: 41760 - protein, 10 aa, Artificial Sequence
  Peptide Derived from Human Papillomavirus
IVKDCGTMCR

SEQ ID NO: 41761 - protein, 11 aa, Artificial Sequence
  Peptide Derived from Human Papillomavirus
IVKDCGTMCRH

SEQ ID NO: 41762 - protein, 9 aa, Artificial Sequence
  Peptide Derived from Human Papillomavirus
KAAMLGKFK

SEQ ID NO: 41763 - protein, 10 aa, Artificial Sequence
  Peptide Derived from Human Papillomavirus
KAICIENNSK

SEQ ID NO: 41764 - protein, 11 aa, Artificial Sequence
  Peptide Derived from Human Papillomavirus
KCAKNRITIEK

SEQ ID NO: 41765 - protein, 9 aa, Artificial Sequence
  Peptide Derived from Human Papillomavirus
KCVSGQNIR

SEQ ID NO: 41766 - protein, 8 aa, Artificial Sequence
  Peptide Derived from Human Papillomavirus
KDCGTMCR

SEQ ID NO: 41767 - protein, 9 aa, Artificial Sequence
  Peptide Derived from Human Papillomavirus
KDCGTMCRH

SEQ ID NO: 41768 - protein, 10 aa, Artificial Sequence
  Peptide Derived from Human Papillomavirus
KDCGTMCRHY

SEQ ID NO: 41769 - protein, 11 aa, Artificial Sequence
  Peptide Derived from Human Papillomavirus
KDCGTMCRHYK

SEQ ID NO: 41770 - protein, 9 aa, Artificial Sequence
  Peptide Derived from Human Papillomavirus
KDDRWPYLH

SEQ ID NO: 41771 - protein, 11 aa, Artificial Sequence
  Peptide Derived from Human Papillomavirus
KDDRWPYLHSR

SEQ ID NO: 41772 - protein, 11 aa, Artificial Sequence
  Peptide Derived from Human Papillomavirus
KIVKDCGTMCR

SEQ ID NO: 41773 - protein, 9 aa, Artificial Sequence
  Peptide Derived from Human Papillomavirus
KLFLKGVPK

SEQ ID NO: 41774 - protein, 10 aa, Artificial Sequence
  Peptide Derived from Human Papillomavirus
KLFLKGVPKK

SEQ ID NO: 41775 - protein, 10 aa, Artificial Sequence
  Peptide Derived from Human Papillomavirus
KLRSTAAALY

SEQ ID NO: 41776 - protein, 8 aa, Artificial Sequence
  Peptide Derived from Human Papillomavirus
KNRITIEK

SEQ ID NO: 41777 - protein, 9 aa, Artificial Sequence
  Peptide Derived from Human Papillomavirus
KNWKSFFSR

SEQ ID NO: 41778 - protein, 10 aa, Artificial Sequence
  Peptide Derived from Human Papillomavirus
KSFFSRTWCR

SEQ ID NO: 41779 - protein, 10 aa, Artificial Sequence
  Peptide Derived from Human Papillomavirus
KSNSQAKIVK

SEQ ID NO: 41780 - protein, 10 aa, Artificial Sequence
  Peptide Derived from Human Papillomavirus
KTLLQPYCLY

SEQ ID NO: 41781 - protein, 9 aa, Artificial Sequence
  Peptide Derived from Human Papillomavirus
KVSDEGDWR

SEQ ID NO: 41782 - protein, 10 aa, Artificial Sequence
  Peptide Derived from Human Papillomavirus
LDDATTPCWH

SEQ ID NO: 41783 - protein, 11 aa, Artificial Sequence
  Peptide Derived from Human Papillomavirus
LDDATTPCWHY

SEQ ID NO: 41784 - protein, 11 aa, Artificial Sequence
  Peptide Derived from Human Papillomavirus
LDGNPVSIDVK

SEQ ID NO: 41785 - protein, 9 aa, Artificial Sequence
  Peptide Derived from Human Papillomavirus
LFELPDSGY

SEQ ID NO: 41786 - protein, 10 aa, Artificial Sequence
  Peptide Derived from Human Papillomavirus
LFHAQEAEEH

SEQ ID NO: 41787 - protein, 8 aa, Artificial Sequence
  Peptide Derived from Human Papillomavirus
LFLKGVPK

SEQ ID NO: 41788 - protein, 9 aa, Artificial Sequence
  Peptide Derived from Human Papillomavirus
LFLKGVPKK

SEQ ID NO: 41789 - protein, 8 aa, Artificial Sequence
  Peptide Derived from Human Papillomavirus
LGKFKELY

SEQ ID NO: 41790 - protein, 10 aa, Artificial Sequence
  Peptide Derived from Human Papillomavirus
LIHGAPNTGK

SEQ ID NO: 41791 - protein, 8 aa, Artificial Sequence
  Peptide Derived from Human Papillomavirus
LIQPPKLR

SEQ ID NO: 41792 - protein, 9 aa, Artificial Sequence
  Peptide Derived from Human Papillomavirus
LIRPFQSNK

SEQ ID NO: 41793 - protein, 10 aa, Artificial Sequence
  Peptide Derived from Human Papillomavirus
LITSNINAGK

SEQ ID NO: 41794 - protein, 11 aa, Artificial Sequence
  Peptide Derived from Human Papillomavirus
LLITSNINAGK

SEQ ID NO: 41795 - protein, 8 aa, Artificial Sequence
  Peptide Derived from Human Papillomavirus
LLQPYCLY

SEQ ID NO: 41796 - protein, 10 aa, Artificial Sequence
  Peptide Derived from Human Papillomavirus
LLQPYCLYCH

SEQ ID NO: 41797 - protein, 10 aa, Artificial Sequence
  Peptide Derived from Human Papillomavirus
LMLVRFKCAK

SEQ ID NO: 41798 - protein, 9 aa, Artificial Sequence
  Peptide Derived from Human Papillomavirus
LNLHEEEDK

SEQ ID NO: 41799 - protein, 9 aa, Artificial Sequence
  Peptide Derived from Human Papillomavirus
LSALKLFLK

SEQ ID NO: 41800 - protein, 10 aa, Artificial Sequence
  Peptide Derived from Human Papillomavirus
LSCNGSDGTH

SEQ ID NO: 41801 - protein, 10 aa, Artificial Sequence
  Peptide Derived from Human Papillomavirus
LSDISSCVDY

SEQ ID NO: 41802 - protein, 9 aa, Artificial Sequence
  Peptide Derived from Human Papillomavirus
LSQMVQWAY

SEQ ID NO: 41803 - protein, 8 aa, Artificial Sequence
  Peptide Derived from Human Papillomavirus
LVRFKCAK

SEQ ID NO: 41804 - protein, 10 aa, Artificial Sequence
  Peptide Derived from Human Papillomavirus
LVRFKCAKNR

SEQ ID NO: 41805 - protein, 10 aa, Artificial Sequence
  Peptide Derived from Human Papillomavirus
MCRHYKRAEK

SEQ ID NO: 41806 - protein, 11 aa, Artificial Sequence
  Peptide Derived from Human Papillomavirus
MCRHYKRAEKR

SEQ ID NO: 41807 - protein, 8 aa, Artificial Sequence
  Peptide Derived from Human Papillomavirus
MDDSEIAY

SEQ ID NO: 41808 - protein, 9 aa, Artificial Sequence
  Peptide Derived from Human Papillomavirus
MDDSEIAYK

SEQ ID NO: 41809 - protein, 10 aa, Artificial Sequence
  Peptide Derived from Human Papillomavirus
MDDSEIAYKY

SEQ ID NO: 41810 - protein, 8 aa, Artificial Sequence
  Peptide Derived from Human Papillomavirus
MGQWIKSR

SEQ ID NO: 41811 - protein, 11 aa, Artificial Sequence
  Peptide Derived from Human Papillomavirus
MGQWIKSRCDK

SEQ ID NO: 41812 - protein, 11 aa, Artificial Sequence
  Peptide Derived from Human Papillomavirus
MLDDATTPCWH

SEQ ID NO: 41813 - protein, 9 aa, Artificial Sequence
  Peptide Derived from Human Papillomavirus
MLGKFKELY

SEQ ID NO: 41814 - protein, 9 aa, Artificial Sequence
  Peptide Derived from Human Papillomavirus
MLIQPPKLR

SEQ ID NO: 41815 - protein, 8 aa, Artificial Sequence
  Peptide Derived from Human Papillomavirus
MLMLVRFK

SEQ ID NO: 41816 - protein, 11 aa, Artificial Sequence
  Peptide Derived from Human Papillomavirus
MLMLVRFKCAK

SEQ ID NO: 41817 - protein, 9 aa, Artificial Sequence
  Peptide Derived from Human Papillomavirus
MLVRFKCAK

SEQ ID NO: 41818 - protein, 11 aa, Artificial Sequence
  Peptide Derived from Human Papillomavirus
MLVRFKCAKNR

SEQ ID NO: 41819 - protein, 8 aa, Artificial Sequence
  Peptide Derived from Human Papillomavirus
MSMGQWIK

SEQ ID NO: 41820 - protein, 10 aa, Artificial Sequence
  Peptide Derived from Human Papillomavirus
MSMGQWIKSR

SEQ ID NO: 41821 - protein, 8 aa, Artificial Sequence
  Peptide Derived from Human Papillomavirus
MSNISDVY

SEQ ID NO: 41822 - protein, 11 aa, Artificial Sequence
  Peptide Derived from Human Papillomavirus
MVDFIDNCNVY

SEQ ID NO: 41823 - protein, 8 aa, Artificial Sequence
  Peptide Derived from Human Papillomavirus
MVMLMLVR

SEQ ID NO: 41824 - protein, 10 aa, Artificial Sequence
  Peptide Derived from Human Papillomavirus
MVMLMLVRFK

SEQ ID NO: 41825 - protein, 10 aa, Artificial Sequence
  Peptide Derived from Human Papillomavirus
NAGKDDRWPY

SEQ ID NO: 41826 - protein, 9 aa, Artificial Sequence
  Peptide Derived from Human Papillomavirus
NCMLIQPPK

SEQ ID NO: 41827 - protein, 11 aa, Artificial Sequence
  Peptide Derived from Human Papillomavirus
NCMLIQPPKLR

SEQ ID NO: 41828 - protein, 10 aa, Artificial Sequence
  Peptide Derived from Human Papillomavirus
NDGDSFSTFK

SEQ ID NO: 41829 - protein, 11 aa, Artificial Sequence
  Peptide Derived from Human Papillomavirus
NDVMDDSEIAY

SEQ ID NO: 41830 - protein, 9 aa, Artificial Sequence
  Peptide Derived from Human Papillomavirus
NGKAAMLGK

SEQ ID NO: 41831 - protein, 11 aa, Artificial Sequence
  Peptide Derived from Human Papillomavirus
NGKAAMLGKFK

SEQ ID NO: 41832 - protein, 11 aa, Artificial Sequence
  Peptide Derived from Human Papillomavirus
NGNPVYELSDK

SEQ ID NO: 41833 - protein, 10 aa, Artificial Sequence
  Peptide Derived from Human Papillomavirus
NGSDGTHSER

SEQ ID NO: 41834 - protein, 9 aa, Artificial Sequence
  Peptide Derived from Human Papillomavirus
NINAGKDDR

SEQ ID NO: 41835 - protein, 8 aa, Artificial Sequence
  Peptide Derived from Human Papillomavirus
NLHEEEDK

SEQ ID NO: 41836 - protein, 8 aa, Artificial Sequence
  Peptide Derived from Human Papillomavirus
NNSKTAKR

SEQ ID NO: 41837 - protein, 9 aa, Artificial Sequence
  Peptide Derived from Human Papillomavirus
NNSKTAKRR

SEQ ID NO: 41838 - protein, 8 aa, Artificial Sequence
  Peptide Derived from Human Papillomavirus
NSKTAKRR

SEQ ID NO: 41839 - protein, 8 aa, Artificial Sequence
  Peptide Derived from Human Papillomavirus
NSQAKIVK

SEQ ID NO: 41840 - protein, 9 aa, Artificial Sequence
  Peptide Derived from Human Papillomavirus
PCWHYIDNY

SEQ ID NO: 41841 - protein, 11 aa, Artificial Sequence
  Peptide Derived from Human Papillomavirus
PCWHYIDNYLR

SEQ ID NO: 41842 - protein, 10 aa, Artificial Sequence
  Peptide Derived from Human Papillomavirus
PFDKNGNPVY

SEQ ID NO: 41843 - protein, 11 aa, Artificial Sequence
  Peptide Derived from Human Papillomavirus
PLSDISSCVDY

SEQ ID NO: 41844 - protein, 8 aa, Artificial Sequence
  Peptide Derived from Human Papillomavirus
PNPFPFDK

SEQ ID NO: 41845 - protein, 10 aa, Artificial Sequence
  Peptide Derived from Human Papillomavirus
PTRNILQVLK

SEQ ID NO: 41846 - protein, 8 aa, Artificial Sequence
  Peptide Derived from Human Papillomavirus
PVSIDVKH

SEQ ID NO: 41847 - protein, 9 aa, Artificial Sequence
  Peptide Derived from Human Papillomavirus
PVSIDVKHK

SEQ ID NO: 41848 - protein, 8 aa, Artificial Sequence
  Peptide Derived from Human Papillomavirus
PVYELSDK

SEQ ID NO: 41849 - protein, 11 aa, Artificial Sequence
  Peptide Derived from Human Papillomavirus
PVYELSDKNWK

SEQ ID NO: 41850 - protein, 11 aa, Artificial Sequence
  Peptide Derived from Human Papillomavirus
QGCIISYANSK

SEQ ID NO: 41851 - protein, 9 aa, Artificial Sequence
  Peptide Derived from Human Papillomavirus
QMSMGQWIK

SEQ ID NO: 41852 - protein, 11 aa, Artificial Sequence
  Peptide Derived from Human Papillomavirus
QMSMGQWIKSR

SEQ ID NO: 41853 - protein, 9 aa, Artificial Sequence
  Peptide Derived from Human Papillomavirus
QVLKTSNGK

SEQ ID NO: 41854 - protein, 8 aa, Artificial Sequence
  Peptide Derived from Human Papillomavirus
RDIVKFLR

SEQ ID NO: 41855 - protein, 9 aa, Artificial Sequence
  Peptide Derived from Human Papillomavirus
RDIVKFLRY

SEQ ID NO: 41856 - protein, 8 aa, Artificial Sequence
  Peptide Derived from Human Papillomavirus
RFKCAKNR

SEQ ID NO: 41857 - protein, 10 aa, Artificial Sequence
  Peptide Derived from Human Papillomavirus
RITIEKLLEK

SEQ ID NO: 41858 - protein, 10 aa, Artificial Sequence
  Peptide Derived from Human Papillomavirus
RLFELPDSGY

SEQ ID NO: 41859 - protein, 10 aa, Artificial Sequence
  Peptide Derived from Human Papillomavirus
RLNLHEEEDK

SEQ ID NO: 41860 - protein, 8 aa, Artificial Sequence
  Peptide Derived from Human Papillomavirus
RNILQVLK

SEQ ID NO: 41861 - protein, 8 aa, Artificial Sequence
  Peptide Derived from Human Papillomavirus
RSTAAALY

SEQ ID NO: 41862 - protein, 10 aa, Artificial Sequence
  Peptide Derived from Human Papillomavirus
RSTAAALYWY

SEQ ID NO: 41863 - protein, 11 aa, Artificial Sequence
  Peptide Derived from Human Papillomavirus
RSTAAALYWYR

SEQ ID NO: 41864 - protein, 11 aa, Artificial Sequence
  Peptide Derived from Human Papillomavirus
RTGMSNISDVY

SEQ ID NO: 41865 - protein, 9 aa, Artificial Sequence
  Peptide Derived from Human Papillomavirus
RTWCRLNLH

SEQ ID NO: 41866 - protein, 8 aa, Artificial Sequence
  Peptide Derived from Human Papillomavirus
SALKLFLK

SEQ ID NO: 41867 - protein, 9 aa, Artificial Sequence
  Peptide Derived from Human Papillomavirus
SCNGSDGTH

SEQ ID NO: 41868 - protein, 10 aa, Artificial Sequence
  Peptide Derived from Human Papillomavirus
SCVDYNISPR

SEQ ID NO: 41869 - protein, 11 aa, Artificial Sequence
  Peptide Derived from Human Papillomavirus
SDEGDWRDIVK

SEQ ID NO: 41870 - protein, 8 aa, Artificial Sequence
  Peptide Derived from Human Papillomavirus
SDGTHSER

SEQ ID NO: 41871 - protein, 9 aa, Artificial Sequence
  Peptide Derived from Human Papillomavirus
SDISSCVDY

SEQ ID NO: 41872 - protein, 11 aa, Artificial Sequence
  Peptide Derived from Human Papillomavirus
SDKNWKSFFSR

SEQ ID NO: 41873 - protein, 10 aa, Artificial Sequence
  Peptide Derived from Human Papillomavirus
SDSNACAFLK

SEQ ID NO: 41874 - protein, 9 aa, Artificial Sequence
  Peptide Derived from Human Papillomavirus
SFFSRTWCR

SEQ ID NO: 41875 - protein, 10 aa, Artificial Sequence
  Peptide Derived from Human Papillomavirus
SFLQGCIISY

SEQ ID NO: 41876 - protein, 11 aa, Artificial Sequence
  Peptide Derived from Human Papillomavirus
SFLSALKLFLK

SEQ ID NO: 41877 - protein, 9 aa, Artificial Sequence
  Peptide Derived from Human Papillomavirus
SMGQWIKSR

SEQ ID NO: 41878 - protein, 8 aa, Artificial Sequence
  Peptide Derived from Human Papillomavirus
SNACAFLK

SEQ ID NO: 41879 - protein, 10 aa, Artificial Sequence
  Peptide Derived from Human Papillomavirus
SNGKAAMLGK

SEQ ID NO: 41880 - protein, 10 aa, Artificial Sequence
  Peptide Derived from Human Papillomavirus
SNINAGKDDR

SEQ ID NO: 41881 - protein, 9 aa, Artificial Sequence
  Peptide Derived from Human Papillomavirus
SNSQAKIVK

SEQ ID NO: 41882 - protein, 11 aa, Artificial Sequence
  Peptide Derived from Human Papillomavirus
SSCVDYNISPR

SEQ ID NO: 41883 - protein, 9 aa, Artificial Sequence
  Peptide Derived from Human Papillomavirus
STAAALYWY

SEQ ID NO: 41884 - protein, 10 aa, Artificial Sequence
  Peptide Derived from Human Papillomavirus
STAAALYWYR

SEQ ID NO: 41885 - protein, 11 aa, Artificial Sequence
  Peptide Derived from Human Papillomavirus
STNCMLIQPPK

SEQ ID NO: 41886 - protein, 8 aa, Artificial Sequence
  Peptide Derived from Human Papillomavirus
TAAALYWY

SEQ ID NO: 41887 - protein, 9 aa, Artificial Sequence
  Peptide Derived from Human Papillomavirus
TAAALYWYR

SEQ ID NO: 41888 - protein, 11 aa, Artificial Sequence
  Peptide Derived from Human Papillomavirus
TFKCVSGQNIR

SEQ ID NO: 41889 - protein, 10 aa, Artificial Sequence
  Peptide Derived from Human Papillomavirus
TFPNPFPFDK

SEQ ID NO: 41890 - protein, 8 aa, Artificial Sequence
  Peptide Derived from Human Papillomavirus
TGCNGWFY

SEQ ID NO: 41891 - protein, 10 aa, Artificial Sequence
  Peptide Derived from Human Papillomavirus
TGMSNISDVY

SEQ ID NO: 41892 - protein, 9 aa, Artificial Sequence
  Peptide Derived from Human Papillomavirus
TGTVAEGFK

SEQ ID NO: 41893 - protein, 8 aa, Artificial Sequence
  Peptide Derived from Human Papillomavirus
TIEKLLEK

SEQ ID NO: 41894 - protein, 9 aa, Artificial Sequence
  Peptide Derived from Human Papillomavirus
TLLQPYCLY

SEQ ID NO: 41895 - protein, 11 aa, Artificial Sequence
  Peptide Derived from Human Papillomavirus
TLLQPYCLYCH

SEQ ID NO: 41896 - protein, 11 aa, Artificial Sequence
  Peptide Derived from Human Papillomavirus
TLSCNGSDGTH

SEQ ID NO: 41897 - protein, 8 aa, Artificial Sequence
  Peptide Derived from Human Papillomavirus
TMCRHYKR

SEQ ID NO: 41898 - protein, 11 aa, Artificial Sequence
  Peptide Derived from Human Papillomavirus
TMCRHYKRAEK

SEQ ID NO: 41899 - protein, 10 aa, Artificial Sequence
  Peptide Derived from Human Papillomavirus
TNCMLIQPPK

SEQ ID NO: 41900 - protein, 11 aa, Artificial Sequence
  Peptide Derived from Human Papillomavirus
TSNGKAAMLGK

SEQ ID NO: 41901 - protein, 8 aa, Artificial Sequence
  Peptide Derived from Human Papillomavirus
TSNINAGK

SEQ ID NO: 41902 - protein, 11 aa, Artificial Sequence
  Peptide Derived from Human Papillomavirus
TSNINAGKDDR

SEQ ID NO: 41903 - protein, 11 aa, Artificial Sequence
  Peptide Derived from Human Papillomavirus
TTPCWHYIDNY

SEQ ID NO: 41904 - protein, 10 aa, Artificial Sequence
  Peptide Derived from Human Papillomavirus
VDFIDNCNVY

SEQ ID NO: 41905 - protein, 8 aa, Artificial Sequence
  Peptide Derived from Human Papillomavirus
VDYNISPR

SEQ ID NO: 41906 - protein, 10 aa, Artificial Sequence
  Peptide Derived from Human Papillomavirus
VDYNISPRLK

SEQ ID NO: 41907 - protein, 8 aa, Artificial Sequence
  Peptide Derived from Human Papillomavirus
VLKTSNGK

SEQ ID NO: 41908 - protein, 9 aa, Artificial Sequence
  Peptide Derived from Human Papillomavirus
VMDDSEIAY

SEQ ID NO: 41909 - protein, 10 aa, Artificial Sequence
  Peptide Derived from Human Papillomavirus
VMDDSEIAYK

SEQ ID NO: 41910 - protein, 11 aa, Artificial Sequence
  Peptide Derived from Human Papillomavirus
VMDDSEIAYKY

SEQ ID NO: 41911 - protein, 9 aa, Artificial Sequence
  Peptide Derived from Human Papillomavirus
VMLMLVRFK

SEQ ID NO: 41912 - protein, 8 aa, Artificial Sequence
  Peptide Derived from Human Papillomavirus
VSDEGDWR

SEQ ID NO: 41913 - protein, 8 aa, Artificial Sequence
  Peptide Derived from Human Papillomavirus
VSFLSALK

SEQ ID NO: 41914 - protein, 8 aa, Artificial Sequence
  Peptide Derived from Human Papillomavirus
VSFMELIR

SEQ ID NO: 41915 - protein, 8 aa, Artificial Sequence
  Peptide Derived from Human Papillomavirus
VSIDVKHK

SEQ ID NO: 41916 - protein, 10 aa, Artificial Sequence
  Peptide Derived from Human Papillomavirus
VTGTVAEGFK

SEQ ID NO: 41917 - protein, 10 aa, Artificial Sequence
  Peptide Derived from Human Papillomavirus
WFYVEAVIDR

SEQ ID NO: 41918 - protein, 10 aa, Artificial Sequence
  Peptide Derived from Human Papillomavirus
WGMVMLMLVR

SEQ ID NO: 41919 - protein, 10 aa, Artificial Sequence
  Peptide Derived from Human Papillomavirus
WIERQTVLQH

SEQ ID NO: 41920 - protein, 8 aa, Artificial Sequence
  Peptide Derived from Human Papillomavirus
WIKSRCDK

SEQ ID NO: 41921 - protein, 9 aa, Artificial Sequence
  Peptide Derived from Human Papillomavirus
WLQPLADAK

SEQ ID NO: 41922 - protein, 10 aa, Artificial Sequence
  Peptide Derived from Human Papillomavirus
YGETPEWIER

SEQ ID NO: 41923 - protein, 10 aa, Artificial Sequence
  Peptide Derived from Human Papillomavirus
YGVSFMELIR

SEQ ID NO: 41924 - protein, 8 aa, Artificial Sequence
  Peptide Derived from Human Papillomavirus
YNISPRLK

SEQ ID NO: 41925 - protein, 8 aa, Artificial Sequence
  Peptide Derived from Human Papillomavirus
YVEAVIDR

SEQ ID NO: 41926 - protein, 9 aa, Artificial Sequence
  Peptide Derived from Human Papillomavirus
AAACTNQTR

SEQ ID NO: 41927 - protein, 8 aa, Artificial Sequence
  Peptide Derived from Human Papillomavirus
AACTNQTR

SEQ ID NO: 41928 - protein, 9 aa, Artificial Sequence
  Peptide Derived from Human Papillomavirus
ALGTSEGVR

SEQ ID NO: 41929 - protein, 10 aa, Artificial Sequence
  Peptide Derived from Human Papillomavirus
ALGTSEGVRR

SEQ ID NO: 41930 - protein, 8 aa, Artificial Sequence
  Peptide Derived from Human Papillomavirus
ALSVSKAK

SEQ ID NO: 41931 - protein, 8 aa, Artificial Sequence
  Peptide Derived from Human Papillomavirus
ANILKCLR

SEQ ID NO: 41932 - protein, 9 aa, Artificial Sequence
  Peptide Derived from Human Papillomavirus
ANILKCLRY

SEQ ID NO: 41933 - protein, 10 aa, Artificial Sequence
  Peptide Derived from Human Papillomavirus
ANILKCLRYR

SEQ ID NO: 41934 - protein, 10 aa, Artificial Sequence
  Peptide Derived from Human Papillomavirus
ANNTTTSNSK

SEQ ID NO: 41935 - protein, 9 aa, Artificial Sequence
  Peptide Derived from Human Papillomavirus
ATTPIIHLK

SEQ ID NO: 41936 - protein, 9 aa, Artificial Sequence
  Peptide Derived from Human Papillomavirus
ATTSTKRPR

SEQ ID NO: 41937 - protein, 10 aa, Artificial Sequence
  Peptide Derived from Human Papillomavirus
CALGTSEGVR

SEQ ID NO: 41938 - protein, 11 aa, Artificial Sequence
  Peptide Derived from Human Papillomavirus
CALGTSEGVRR

SEQ ID NO: 41939 - protein, 8 aa, Artificial Sequence
  Peptide Derived from Human Papillomavirus
CDHIDYWK

SEQ ID NO: 41940 - protein, 9 aa, Artificial Sequence
  Peptide Derived from Human Papillomavirus
CDHIDYWKH

SEQ ID NO: 41941 - protein, 11 aa, Artificial Sequence
  Peptide Derived from Human Papillomavirus
CDHIDYWKHIR

SEQ ID NO: 41942 - protein, 8 aa, Artificial Sequence
  Peptide Derived from Human Papillomavirus
CLRYRLSK

SEQ ID NO: 41943 - protein, 9 aa, Artificial Sequence
  Peptide Derived from Human Papillomavirus
CLRYRLSKY

SEQ ID NO: 41944 - protein, 10 aa, Artificial Sequence
  Peptide Derived from Human Papillomavirus
CLRYRLSKYK

SEQ ID NO: 41945 - protein, 11 aa, Artificial Sequence
  Peptide Derived from Human Papillomavirus
CTVVEGQVNCK

SEQ ID NO: 41946 - protein, 8 aa, Artificial Sequence
  Peptide Derived from Human Papillomavirus
CVLMYKAR

SEQ ID NO: 41947 - protein, 9 aa, Artificial Sequence
  Peptide Derived from Human Papillomavirus
DANILKCLR

SEQ ID NO: 41948 - protein, 10 aa, Artificial Sequence
  Peptide Derived from Human Papillomavirus
DANILKCLRY

SEQ ID NO: 41949 - protein, 11 aa, Artificial Sequence
  Peptide Derived from Human Papillomavirus
DANILKCLRYR

SEQ ID NO: 41950 - protein, 8 aa, Artificial Sequence
  Peptide Derived from Human Papillomavirus
DDFLNTVK

SEQ ID NO: 41951 - protein, 9 aa, Artificial Sequence
  Peptide Derived from Human Papillomavirus
DGDVHNTMH

SEQ ID NO: 41952 - protein, 10 aa, Artificial Sequence
  Peptide Derived from Human Papillomavirus
DGDVHNTMHY

SEQ ID NO: 41953 - protein, 8 aa, Artificial Sequence
  Peptide Derived from Human Papillomavirus
DSKRLCDH

SEQ ID NO: 41954 - protein, 11 aa, Artificial Sequence
  Peptide Derived from Human Papillomavirus
DSKRLCDHIDY

SEQ ID NO: 41955 - protein, 8 aa, Artificial Sequence
  Peptide Derived from Human Papillomavirus
DVHNTMHY

SEQ ID NO: 41956 - protein, 9 aa, Artificial Sequence
  Peptide Derived from Human Papillomavirus
EAKKYGTGK

SEQ ID NO: 41957 - protein, 10 aa, Artificial Sequence
  Peptide Derived from Human Papillomavirus
EAKKYGTGKK

SEQ ID NO: 41958 - protein, 9 aa, Artificial Sequence
  Peptide Derived from Human Papillomavirus
ECVLMYKAR

SEQ ID NO: 41959 - protein, 10 aa, Artificial Sequence
  Peptide Derived from Human Papillomavirus
EGQVNCKGIY

SEQ ID NO: 41960 - protein, 11 aa, Artificial Sequence
  Peptide Derived from Human Papillomavirus
EGQVNCKGIYY

SEQ ID NO: 41961 - protein, 11 aa, Artificial Sequence
  Peptide Derived from Human Papillomavirus
EGVRRATTSTK

SEQ ID NO: 41962 - protein, 10 aa, Artificial Sequence
  Peptide Derived from Human Papillomavirus
EISFAGIVTK

SEQ ID NO: 41963 - protein, 9 aa, Artificial Sequence
  Peptide Derived from Human Papillomavirus
EMGIHSINH

SEQ ID NO: 41964 - protein, 10 aa, Artificial Sequence
  Peptide Derived from Human Papillomavirus
ENDSKRLCDH

SEQ ID NO: 41965 - protein, 8 aa, Artificial Sequence
  Peptide Derived from Human Papillomavirus
ETLNNTEY

SEQ ID NO: 41966 - protein, 9 aa, Artificial Sequence
  Peptide Derived from Human Papillomavirus
ETLNNTEYK

SEQ ID NO: 41967 - protein, 9 aa, Artificial Sequence
  Peptide Derived from Human Papillomavirus
EVQFDGDVH

SEQ ID NO: 41968 - protein, 10 aa, Artificial Sequence
  Peptide Derived from Human Papillomavirus
FDGDVHNTMH

SEQ ID NO: 41969 - protein, 11 aa, Artificial Sequence
  Peptide Derived from Human Papillomavirus
FDGDVHNTMHY

SEQ ID NO: 41970 - protein, 8 aa, Artificial Sequence
  Peptide Derived from Human Papillomavirus
FTEEAKKY

SEQ ID NO: 41971 - protein, 9 aa, Artificial Sequence
  Peptide Derived from Human Papillomavirus
FVNFTEEAK

SEQ ID NO: 41972 - protein, 10 aa, Artificial Sequence
  Peptide Derived from Human Papillomavirus
FVNFTEEAKK

SEQ ID NO: 41973 - protein, 11 aa, Artificial Sequence
  Peptide Derived from Human Papillomavirus
FVNFTEEAKKY

SEQ ID NO: 41974 - protein, 8 aa, Artificial Sequence
  Peptide Derived from Human Papillomavirus
GCLKKHGY

SEQ ID NO: 41975 - protein, 10 aa, Artificial Sequence
  Peptide Derived from Human Papillomavirus
GDANILKCLR

SEQ ID NO: 41976 - protein, 11 aa, Artificial Sequence
  Peptide Derived from Human Papillomavirus
GDANILKCLRY

SEQ ID NO: 41977 - protein, 8 aa, Artificial Sequence
  Peptide Derived from Human Papillomavirus
GDVHNTMH

SEQ ID NO: 41978 - protein, 9 aa, Artificial Sequence
  Peptide Derived from Human Papillomavirus
GDVHNTMHY

SEQ ID NO: 41979 - protein, 9 aa, Artificial Sequence
  Peptide Derived from Human Papillomavirus
GIYYVHEGH

SEQ ID NO: 41980 - protein, 9 aa, Artificial Sequence
  Peptide Derived from Human Papillomavirus
GTGKKWEVH

SEQ ID NO: 41981 - protein, 8 aa, Artificial Sequence
  Peptide Derived from Human Papillomavirus
GTSEGVRR

SEQ ID NO: 41982 - protein, 10 aa, Artificial Sequence
  Peptide Derived from Human Papillomavirus
GVRRATTSTK

SEQ ID NO: 41983 - protein, 11 aa, Artificial Sequence
  Peptide Derived from Human Papillomavirus
GVRRATTSTKR

SEQ ID NO: 41984 - protein, 9 aa, Artificial Sequence
  Peptide Derived from Human Papillomavirus
HIDYWKHIR

SEQ ID NO: 41985 - protein, 10 aa, Artificial Sequence
  Peptide Derived from Human Papillomavirus
HIRLECVLMY

SEQ ID NO: 41986 - protein, 11 aa, Artificial Sequence
  Peptide Derived from Human Papillomavirus
HIRLECVLMYK

SEQ ID NO: 41987 - protein, 10 aa, Artificial Sequence
  Peptide Derived from Human Papillomavirus
HLKGDANILK

SEQ ID NO: 41988 - protein, 10 aa, Artificial Sequence
  Peptide Derived from Human Papillomavirus
HNTMHYTNWK

SEQ ID NO: 41989 - protein, 8 aa, Artificial Sequence
  Peptide Derived from Human Papillomavirus
IDYWKHIR

SEQ ID NO: 41990 - protein, 10 aa, Artificial Sequence
  Peptide Derived from Human Papillomavirus
ILEHYENDSK

SEQ ID NO: 41991 - protein, 11 aa, Artificial Sequence
  Peptide Derived from Human Papillomavirus
ILEHYENDSKR

SEQ ID NO: 41992 - protein, 8 aa, Artificial Sequence
  Peptide Derived from Human Papillomavirus
ILKCLRYR

SEQ ID NO: 41993 - protein, 11 aa, Artificial Sequence
  Peptide Derived from Human Papillomavirus
ILKCLRYRLSK

SEQ ID NO: 41994 - protein, 11 aa, Artificial Sequence
  Peptide Derived from Human Papillomavirus
ISAAACTNQTR

SEQ ID NO: 41995 - protein, 9 aa, Artificial Sequence
  Peptide Derived from Human Papillomavirus
ISFAGIVTK

SEQ ID NO: 41996 - protein, 8 aa, Artificial Sequence
  Peptide Derived from Human Papillomavirus
KAREMGIH

SEQ ID NO: 41997 - protein, 9 aa, Artificial Sequence
  Peptide Derived from Human Papillomavirus
KCLRYRLSK

SEQ ID NO: 41998 - protein, 10 aa, Artificial Sequence
  Peptide Derived from Human Papillomavirus
KCLRYRLSKY

SEQ ID NO: 41999 - protein, 11 aa, Artificial Sequence
  Peptide Derived from Human Papillomavirus
KCLRYRLSKYK

SEQ ID NO: 42000 - protein, 8 aa, Artificial Sequence
  Peptide Derived from Human Papillomavirus
KGDANILK

SEQ ID NO: 42001 - protein, 11 aa, Artificial Sequence
  Peptide Derived from Human Papillomavirus
KGDANILKCLR

SEQ ID NO: 42002 - protein, 10 aa, Artificial Sequence
  Peptide Derived from Human Papillomavirus
KGIYYVHEGH

SEQ ID NO: 42003 - protein, 11 aa, Artificial Sequence
  Peptide Derived from Human Papillomavirus
KILEHYENDSK

SEQ ID NO: 42004 - protein, 9 aa, Artificial Sequence
  Peptide Derived from Human Papillomavirus
KNAIVTLTY

SEQ ID NO: 42005 - protein, 9 aa, Artificial Sequence
  Peptide Derived from Human Papillomavirus
LCDHIDYWK

SEQ ID NO: 42006 - protein, 10 aa, Artificial Sequence
  Peptide Derived from Human Papillomavirus
LCDHIDYWKH

SEQ ID NO: 42007 - protein, 8 aa, Artificial Sequence
  Peptide Derived from Human Papillomavirus
LGTSEGVR

SEQ ID NO: 42008 - protein, 9 aa, Artificial Sequence
  Peptide Derived from Human Papillomavirus
LGTSEGVRR

SEQ ID NO: 42009 - protein, 11 aa, Artificial Sequence
  Peptide Derived from Human Papillomavirus
LMYKAREMGIH

SEQ ID NO: 42010 - protein, 11 aa, Artificial Sequence
  Peptide Derived from Human Papillomavirus
LNVCQDKILEH

SEQ ID NO: 42011 - protein, 8 aa, Artificial Sequence
  Peptide Derived from Human Papillomavirus
LSKYKQLY

SEQ ID NO: 42012 - protein, 11 aa, Artificial Sequence
  Peptide Derived from Human Papillomavirus
LSQRLNVCQDK

SEQ ID NO: 42013 - protein, 9 aa, Artificial Sequence
  Peptide Derived from Human Papillomavirus
LTAPTGCLK

SEQ ID NO: 42014 - protein, 10 aa, Artificial Sequence
  Peptide Derived from Human Papillomavirus
LTAPTGCLKK

SEQ ID NO: 42015 - protein, 11 aa, Artificial Sequence
  Peptide Derived from Human Papillomavirus
LTAPTGCLKKH

SEQ ID NO: 42016 - protein, 9 aa, Artificial Sequence
  Peptide Derived from Human Papillomavirus
LTYISTSQR

SEQ ID NO: 42017 - protein, 8 aa, Artificial Sequence
  Peptide Derived from Human Papillomavirus
MGIHSINH

SEQ ID NO: 42018 - protein, 10 aa, Artificial Sequence
  Peptide Derived from Human Papillomavirus
MLETLNNTEY

SEQ ID NO: 42019 - protein, 11 aa, Artificial Sequence
  Peptide Derived from Human Papillomavirus
MLETLNNTEYK

SEQ ID NO: 42020 - protein, 11 aa, Artificial Sequence
  Peptide Derived from Human Papillomavirus
MMLETLNNTEY

SEQ ID NO: 42021 - protein, 8 aa, Artificial Sequence
  Peptide Derived from Human Papillomavirus
NAIVTLTY

SEQ ID NO: 42022 - protein, 9 aa, Artificial Sequence
  Peptide Derived from Human Papillomavirus
NCKGIYYVH

SEQ ID NO: 42023 - protein, 9 aa, Artificial Sequence
  Peptide Derived from Human Papillomavirus
NDSKRLCDH

SEQ ID NO: 42024 - protein, 8 aa, Artificial Sequence
  Peptide Derived from Human Papillomavirus
NFTEEAKK

SEQ ID NO: 42025 - protein, 9 aa, Artificial Sequence
  Peptide Derived from Human Papillomavirus
NFTEEAKKY

SEQ ID NO: 42026 - protein, 8 aa, Artificial Sequence
  Peptide Derived from Human Papillomavirus
NILKCLRY

SEQ ID NO: 42027 - protein, 9 aa, Artificial Sequence
  Peptide Derived from Human Papillomavirus
NILKCLRYR

SEQ ID NO: 42028 - protein, 9 aa, Artificial Sequence
  Peptide Derived from Human Papillomavirus
NNTTTSNSK

SEQ ID NO: 42029 - protein, 10 aa, Artificial Sequence
  Peptide Derived from Human Papillomavirus
NTHHPNKLLR

SEQ ID NO: 42030 - protein, 9 aa, Artificial Sequence
  Peptide Derived from Human Papillomavirus
NTMHYTNWK

SEQ ID NO: 42031 - protein, 8 aa, Artificial Sequence
  Peptide Derived from Human Papillomavirus
NTTTSNSK

SEQ ID NO: 42032 - protein, 9 aa, Artificial Sequence
  Peptide Derived from Human Papillomavirus
NTVSVSTGY

SEQ ID NO: 42033 - protein, 10 aa, Artificial Sequence
  Peptide Derived from Human Papillomavirus
NVCQDKILEH

SEQ ID NO: 42034 - protein, 11 aa, Artificial Sequence
  Peptide Derived from Human Papillomavirus
NVCQDKILEHY

SEQ ID NO: 42035 - protein, 9 aa, Artificial Sequence
  Peptide Derived from Human Papillomavirus
PALSVSKAK

SEQ ID NO: 42036 - protein, 8 aa, Artificial Sequence
  Peptide Derived from Human Papillomavirus
PATTPIIH

SEQ ID NO: 42037 - protein, 10 aa, Artificial Sequence
  Peptide Derived from Human Papillomavirus
PATTPIIHLK

SEQ ID NO: 42038 - protein, 10 aa, Artificial Sequence
  Peptide Derived from Human Papillomavirus
PNTVSVSTGY

SEQ ID NO: 42039 - protein, 8 aa, Artificial Sequence
  Peptide Derived from Human Papillomavirus
PTGCLKKH

SEQ ID NO: 42040 - protein, 10 aa, Artificial Sequence
  Peptide Derived from Human Papillomavirus
PTGCLKKHGY

SEQ ID NO: 42041 - protein, 8 aa, Artificial Sequence
  Peptide Derived from Human Papillomavirus
QDKILEHY

SEQ ID NO: 42042 - protein, 11 aa, Artificial Sequence
  Peptide Derived from Human Papillomavirus
QFDGDVHNTMH

SEQ ID NO: 42043 - protein, 11 aa, Artificial Sequence
  Peptide Derived from Human Papillomavirus
QLYEQVSSTWH

SEQ ID NO: 42044 - protein, 8 aa, Artificial Sequence
  Peptide Derived from Human Papillomavirus
QVNCKGIY

SEQ ID NO: 42045 - protein, 9 aa, Artificial Sequence
  Peptide Derived from Human Papillomavirus
QVNCKGIYY

SEQ ID NO: 42046 - protein, 11 aa, Artificial Sequence
  Peptide Derived from Human Papillomavirus
QVNCKGIYYVH

SEQ ID NO: 42047 - protein, 10 aa, Artificial Sequence
  Peptide Derived from Human Papillomavirus
QVVPALSVSK

SEQ ID NO: 42048 - protein, 8 aa, Artificial Sequence
  Peptide Derived from Human Papillomavirus
RATTSTKR

SEQ ID NO: 42049 - protein, 10 aa, Artificial Sequence
  Peptide Derived from Human Papillomavirus
RATTSTKRPR

SEQ ID NO: 42050 - protein, 9 aa, Artificial Sequence
  Peptide Derived from Human Papillomavirus
RDDFLNTVK

SEQ ID NO: 42051 - protein, 8 aa, Artificial Sequence
  Peptide Derived from Human Papillomavirus
RLCDHIDY

SEQ ID NO: 42052 - protein, 10 aa, Artificial Sequence
  Peptide Derived from Human Papillomavirus
RLCDHIDYWK

SEQ ID NO: 42053 - protein, 11 aa, Artificial Sequence
  Peptide Derived from Human Papillomavirus
RLCDHIDYWKH

SEQ ID NO: 42054 - protein, 8 aa, Artificial Sequence
  Peptide Derived from Human Papillomavirus
RLECVLMY

SEQ ID NO: 42055 - protein, 9 aa, Artificial Sequence
  Peptide Derived from Human Papillomavirus
RLECVLMYK

SEQ ID NO: 42056 - protein, 11 aa, Artificial Sequence
  Peptide Derived from Human Papillomavirus
RLECVLMYKAR

SEQ ID NO: 42057 - protein, 8 aa, Artificial Sequence
  Peptide Derived from Human Papillomavirus
RLNVCQDK

SEQ ID NO: 42058 - protein, 9 aa, Artificial Sequence
  Peptide Derived from Human Papillomavirus
RLSKYKQLY

SEQ ID NO: 42059 - protein, 8 aa, Artificial Sequence
  Peptide Derived from Human Papillomavirus
RNTHHPNK

SEQ ID NO: 42060 - protein, 11 aa, Artificial Sequence
  Peptide Derived from Human Papillomavirus
RNTHHPNKLLR

SEQ ID NO: 42061 - protein, 10 aa, Artificial Sequence
  Peptide Derived from Human Papillomavirus
RTEPEHRNTH

SEQ ID NO: 42062 - protein, 11 aa, Artificial Sequence
  Peptide Derived from Human Papillomavirus
RTEPEHRNTHH

SEQ ID NO: 42063 - protein, 10 aa, Artificial Sequence
  Peptide Derived from Human Papillomavirus
SAAACTNQTR

SEQ ID NO: 42064 - protein, 10 aa, Artificial Sequence
  Peptide Derived from Human Papillomavirus
SCPATTPIIH

SEQ ID NO: 42065 - protein, 8 aa, Artificial Sequence
  Peptide Derived from Human Papillomavirus
SFAGIVTK

SEQ ID NO: 42066 - protein, 11 aa, Artificial Sequence
  Peptide Derived from Human Papillomavirus
STKRPRTEPEH

SEQ ID NO: 42067 - protein, 11 aa, Artificial Sequence
  Peptide Derived from Human Papillomavirus
STWHWTCTDGK

SEQ ID NO: 42068 - protein, 11 aa, Artificial Sequence
  Peptide Derived from Human Papillomavirus
TANNTTTSNSK

SEQ ID NO: 42069 - protein, 8 aa, Artificial Sequence
  Peptide Derived from Human Papillomavirus
TAPTGCLK

SEQ ID NO: 42070 - protein, 9 aa, Artificial Sequence
  Peptide Derived from Human Papillomavirus
TAPTGCLKK

SEQ ID NO: 42071 - protein, 10 aa, Artificial Sequence
  Peptide Derived from Human Papillomavirus
TAPTGCLKKH

SEQ ID NO: 42072 - protein, 11 aa, Artificial Sequence
  Peptide Derived from Human Papillomavirus
TCALGTSEGVR

SEQ ID NO: 42073 - protein, 8 aa, Artificial Sequence
  Peptide Derived from Human Papillomavirus
TCTDGKHK

SEQ ID NO: 42074 - protein, 9 aa, Artificial Sequence
  Peptide Derived from Human Papillomavirus
TGCLKKHGY

SEQ ID NO: 42075 - protein, 8 aa, Artificial Sequence
  Peptide Derived from Human Papillomavirus
TGKKWEVH

SEQ ID NO: 42076 - protein, 8 aa, Artificial Sequence
  Peptide Derived from Human Papillomavirus
TLNNTEYK

SEQ ID NO: 42077 - protein, 10 aa, Artificial Sequence
  Peptide Derived from Human Papillomavirus
TLTYISTSQR

SEQ ID NO: 42078 - protein, 8 aa, Artificial Sequence
  Peptide Derived from Human Papillomavirus
TMHYTNWK

SEQ ID NO: 42079 - protein, 11 aa, Artificial Sequence
  Peptide Derived from Human Papillomavirus
TMHYTNWKFIY

SEQ ID NO: 42080 - protein, 10 aa, Artificial Sequence
  Peptide Derived from Human Papillomavirus
TMQQTSLELY

SEQ ID NO: 42081 - protein, 8 aa, Artificial Sequence
  Peptide Derived from Human Papillomavirus
TTPIIHLK

SEQ ID NO: 42082 - protein, 8 aa, Artificial Sequence
  Peptide Derived from Human Papillomavirus
TTSTKRPR

SEQ ID NO: 42083 - protein, 11 aa, Artificial Sequence
  Peptide Derived from Human Papillomavirus
TVEVQFDGDVH

SEQ ID NO: 42084 - protein, 8 aa, Artificial Sequence
  Peptide Derived from Human Papillomavirus
TVSVSTGY

SEQ ID NO: 42085 - protein, 10 aa, Artificial Sequence
  Peptide Derived from Human Papillomavirus
TVVEGQVNCK

SEQ ID NO: 42086 - protein, 9 aa, Artificial Sequence
  Peptide Derived from Human Papillomavirus
VCQDKILEH

SEQ ID NO: 42087 - protein, 10 aa, Artificial Sequence
  Peptide Derived from Human Papillomavirus
VCQDKILEHY

SEQ ID NO: 42088 - protein, 8 aa, Artificial Sequence
  Peptide Derived from Human Papillomavirus
VNCKGIYY

SEQ ID NO: 42089 - protein, 10 aa, Artificial Sequence
  Peptide Derived from Human Papillomavirus
VNCKGIYYVH

SEQ ID NO: 42090 - protein, 8 aa, Artificial Sequence
  Peptide Derived from Human Papillomavirus
VNFTEEAK

SEQ ID NO: 42091 - protein, 9 aa, Artificial Sequence
  Peptide Derived from Human Papillomavirus
VNFTEEAKK

SEQ ID NO: 42092 - protein, 10 aa, Artificial Sequence
  Peptide Derived from Human Papillomavirus
VNFTEEAKKY

SEQ ID NO: 42093 - protein, 11 aa, Artificial Sequence
  Peptide Derived from Human Papillomavirus
VSCPATTPIIH

SEQ ID NO: 42094 - protein, 11 aa, Artificial Sequence
  Peptide Derived from Human Papillomavirus
VTLTYISTSQR

SEQ ID NO: 42095 - protein, 9 aa, Artificial Sequence
  Peptide Derived from Human Papillomavirus
VVEGQVNCK

SEQ ID NO: 42096 - protein, 9 aa, Artificial Sequence
  Peptide Derived from Human Papillomavirus
VVPALSVSK

SEQ ID NO: 42097 - protein, 11 aa, Artificial Sequence
  Peptide Derived from Human Papillomavirus
VVPALSVSKAK

SEQ ID NO: 42098 - protein, 8 aa, Artificial Sequence
  Peptide Derived from Human Papillomavirus
WTCTDGKH

SEQ ID NO: 42099 - protein, 9 aa, Artificial Sequence
  Peptide Derived from Human Papillomavirus
WTCTDGKHK

SEQ ID NO: 42100 - protein, 11 aa, Artificial Sequence
  Peptide Derived from Human Papillomavirus
WTMQQTSLELY

SEQ ID NO: 42101 - protein, 10 aa, Artificial Sequence
  Peptide Derived from Human Papillomavirus
YFVNFTEEAK

SEQ ID NO: 42102 - protein, 11 aa, Artificial Sequence
  Peptide Derived from Human Papillomavirus
YFVNFTEEAKK

SEQ ID NO: 42103 - protein, 10 aa, Artificial Sequence
  Peptide Derived from Human Papillomavirus
YGTGKKWEVH

SEQ ID NO: 42104 - protein, 10 aa, Artificial Sequence
  Peptide Derived from Human Papillomavirus
YLTAPTGCLK

SEQ ID NO: 42105 - protein, 11 aa, Artificial Sequence
  Peptide Derived from Human Papillomavirus
YLTAPTGCLKK

SEQ ID NO: 42106 - protein, 8 aa, Artificial Sequence
  Peptide Derived from Human Papillomavirus
YTNWKFIY

SEQ ID NO: 42107 - protein, 9 aa, Artificial Sequence
  Peptide Derived from Human Papillomavirus
YVHEGHITY

SEQ ID NO: 42108 - protein, 11 aa, Artificial Sequence
  Peptide Derived from Human Papillomavirus
ATSPLRCFCIY

SEQ ID NO: 42109 - protein, 10 aa, Artificial Sequence
  Peptide Derived from Human Papillomavirus
CFCIYVVFIY

SEQ ID NO: 42110 - protein, 8 aa, Artificial Sequence
  Peptide Derived from Human Papillomavirus
CIYVVFIY

SEQ ID NO: 42111 - protein, 11 aa, Artificial Sequence
  Peptide Derived from Human Papillomavirus
CVLLFVCLVIR

SEQ ID NO: 42112 - protein, 9 aa, Artificial Sequence
  Peptide Derived from Human Papillomavirus
FCIYVVFIY

SEQ ID NO: 42113 - protein, 10 aa, Artificial Sequence
  Peptide Derived from Human Papillomavirus
FIYIPLFVIH

SEQ ID NO: 42114 - protein, 11 aa, Artificial Sequence
  Peptide Derived from Human Papillomavirus
ILWVIATSPLR

SEQ ID NO: 42115 - protein, 8 aa, Artificial Sequence
  Peptide Derived from Human Papillomavirus
LFVCLVIR

SEQ ID NO: 42116 - protein, 9 aa, Artificial Sequence
  Peptide Derived from Human Papillomavirus
LLFVCLVIR

SEQ ID NO: 42117 - protein, 8 aa, Artificial Sequence
  Peptide Derived from Human Papillomavirus
LVLSVSVY

SEQ ID NO: 42118 - protein, 8 aa, Artificial Sequence
  Peptide Derived from Human Papillomavirus
PLFVIHTH

SEQ ID NO: 42119 - protein, 8 aa, Artificial Sequence
  Peptide Derived from Human Papillomavirus
PLRCFCIY

SEQ ID NO: 42120 - protein, 9 aa, Artificial Sequence
  Peptide Derived from Human Papillomavirus
PLVLSVSVY

SEQ ID NO: 42121 - protein, 11 aa, Artificial Sequence
  Peptide Derived from Human Papillomavirus
RCFCIYVVFIY

SEQ ID NO: 42122 - protein, 10 aa, Artificial Sequence
  Peptide Derived from Human Papillomavirus
TSPLRCFCIY

SEQ ID NO: 42123 - protein, 11 aa, Artificial Sequence
  Peptide Derived from Human Papillomavirus
VFIYIPLFVIH

SEQ ID NO: 42124 - protein, 8 aa, Artificial Sequence
  Peptide Derived from Human Papillomavirus
VIATSPLR

SEQ ID NO: 42125 - protein, 10 aa, Artificial Sequence
  Peptide Derived from Human Papillomavirus
VLLFVCLVIR

SEQ ID NO: 42126 - protein, 9 aa, Artificial Sequence
  Peptide Derived from Human Papillomavirus
WVIATSPLR

SEQ ID NO: 42127 - protein, 8 aa, Artificial Sequence
  Peptide Derived from Human Papillomavirus
YIPLFVIH

SEQ ID NO: 42128 - protein, 10 aa, Artificial Sequence
  Peptide Derived from Human Papillomavirus
YIPLFVIHTH

SEQ ID NO: 42129 - protein, 9 aa, Artificial Sequence
  Peptide Derived from Human Papillomavirus
AFTDLTIVY

SEQ ID NO: 42130 - protein, 10 aa, Artificial Sequence
  Peptide Derived from Human Papillomavirus
AFTDLTIVYR

SEQ ID NO: 42131 - protein, 10 aa, Artificial Sequence
  Peptide Derived from Human Papillomavirus
ALEIPYDELR

SEQ ID NO: 42132 - protein, 9 aa, Artificial Sequence
  Peptide Derived from Human Papillomavirus
CIACWRRPR

SEQ ID NO: 42133 - protein, 8 aa, Artificial Sequence
  Peptide Derived from Human Papillomavirus
CTKCLRFY

SEQ ID NO: 42134 - protein, 10 aa, Artificial Sequence
  Peptide Derived from Human Papillomavirus
CTKCLRFYSK

SEQ ID NO: 42135 - protein, 10 aa, Artificial Sequence
  Peptide Derived from Human Papillomavirus
DDTPHGVCTK

SEQ ID NO: 42136 - protein, 11 aa, Artificial Sequence
  Peptide Derived from Human Papillomavirus
DFAFTDLTIVY

SEQ ID NO: 42137 - protein, 11 aa, Artificial Sequence
  Peptide Derived from Human Papillomavirus
DLLIRCITCQR

SEQ ID NO: 42138 - protein, 9 aa, Artificial Sequence
  Peptide Derived from Human Papillomavirus
DTPHGVCTK

SEQ ID NO: 42139 - protein, 10 aa, Artificial Sequence
  Peptide Derived from Human Papillomavirus
EFRWYRYSVY

SEQ ID NO: 42140 - protein, 8 aa, Artificial Sequence
  Peptide Derived from Human Papillomavirus
EIPYDELR

SEQ ID NO: 42141 - protein, 8 aa, Artificial Sequence
  Peptide Derived from Human Papillomavirus
ELRLNCVY

SEQ ID NO: 42142 - protein, 10 aa, Artificial Sequence
  Peptide Derived from Human Papillomavirus
ELRLNCVYCK

SEQ ID NO: 42143 - protein, 10 aa, Artificial Sequence
  Peptide Derived from Human Papillomavirus
ELSSALEIPY

SEQ ID NO: 42144 - protein, 10 aa, Artificial Sequence
  Peptide Derived from Human Papillomavirus
FAFTDLTIVY

SEQ ID NO: 42145 - protein, 11 aa, Artificial Sequence
  Peptide Derived from Human Papillomavirus
FAFTDLTIVYR

SEQ ID NO: 42146 - protein, 8 aa, Artificial Sequence
  Peptide Derived from Human Papillomavirus
FTDLTIVY

SEQ ID NO: 42147 - protein, 9 aa, Artificial Sequence
  Peptide Derived from Human Papillomavirus
FTDLTIVYR

SEQ ID NO: 42148 - protein, 8 aa, Artificial Sequence
  Peptide Derived from Human Papillomavirus
GICDLLIR

SEQ ID NO: 42149 - protein, 10 aa, Artificial Sequence
  Peptide Derived from Human Papillomavirus
GTTLEKLTNK

SEQ ID NO: 42150 - protein, 8 aa, Artificial Sequence
  Peptide Derived from Human Papillomavirus
GVCTKCLR

SEQ ID NO: 42151 - protein, 10 aa, Artificial Sequence
  Peptide Derived from Human Papillomavirus
GVCTKCLRFY

SEQ ID NO: 42152 - protein, 9 aa, Artificial Sequence
  Peptide Derived from Human Papillomavirus
HGVCTKCLR

SEQ ID NO: 42153 - protein, 11 aa, Artificial Sequence
  Peptide Derived from Human Papillomavirus
HGVCTKCLRFY

SEQ ID NO: 42154 - protein, 9 aa, Artificial Sequence
  Peptide Derived from Human Papillomavirus
HLDKKKRFH

SEQ ID NO: 42155 - protein, 10 aa, Artificial Sequence
  Peptide Derived from Human Papillomavirus
HNIGGRWTGR

SEQ ID NO: 42156 - protein, 8 aa, Artificial Sequence
  Peptide Derived from Human Papillomavirus
IACWRRPR

SEQ ID NO: 42157 - protein, 8 aa, Artificial Sequence
  Peptide Derived from Human Papillomavirus
IGGRWTGR

SEQ ID NO: 42158 - protein, 9 aa, Artificial Sequence
  Peptide Derived from Human Papillomavirus
IVYRDDTPH

SEQ ID NO: 42159 - protein, 8 aa, Artificial Sequence
  Peptide Derived from Human Papillomavirus
KCLRFYSK

SEQ ID NO: 42160 - protein, 9 aa, Artificial Sequence
  Peptide Derived from Human Papillomavirus
KGICDLLIR

SEQ ID NO: 42161 - protein, 8 aa, Artificial Sequence
  Peptide Derived from Human Papillomavirus
KNPAERPR

SEQ ID NO: 42162 - protein, 9 aa, Artificial Sequence
  Peptide Derived from Human Papillomavirus
KNPAERPRK

SEQ ID NO: 42163 - protein, 11 aa, Artificial Sequence
  Peptide Derived from Human Papillomavirus
KNPAERPRKLH

SEQ ID NO: 42164 - protein, 8 aa, Artificial Sequence
  Peptide Derived from Human Papillomavirus
KVSEFRWY

SEQ ID NO: 42165 - protein, 9 aa, Artificial Sequence
  Peptide Derived from Human Papillomavirus
KVSEFRWYR

SEQ ID NO: 42166 - protein, 10 aa, Artificial Sequence
  Peptide Derived from Human Papillomavirus
KVSEFRWYRY

SEQ ID NO: 42167 - protein, 8 aa, Artificial Sequence
  Peptide Derived from Human Papillomavirus
LCPEEKQR

SEQ ID NO: 42168 - protein, 9 aa, Artificial Sequence
  Peptide Derived from Human Papillomavirus
LCPEEKQRH

SEQ ID NO: 42169 - protein, 8 aa, Artificial Sequence
  Peptide Derived from Human Papillomavirus
LDKKKRFH

SEQ ID NO: 42170 - protein, 9 aa, Artificial Sequence
  Peptide Derived from Human Papillomavirus
LIRCITCQR

SEQ ID NO: 42171 - protein, 10 aa, Artificial Sequence
  Peptide Derived from Human Papillomavirus
LLIRCITCQR

SEQ ID NO: 42172 - protein, 9 aa, Artificial Sequence
  Peptide Derived from Human Papillomavirus
LSSALEIPY

SEQ ID NO: 42173 - protein, 11 aa, Artificial Sequence
  Peptide Derived from Human Papillomavirus
LTIVYRDDTPH

SEQ ID NO: 42174 - protein, 8 aa, Artificial Sequence
  Peptide Derived from Human Papillomavirus
MFKNPAER

SEQ ID NO: 42175 - protein, 10 aa, Artificial Sequence
  Peptide Derived from Human Papillomavirus
MFKNPAERPR

SEQ ID NO: 42176 - protein, 11 aa, Artificial Sequence
  Peptide Derived from Human Papillomavirus
MFKNPAERPRK

SEQ ID NO: 42177 - protein, 9 aa, Artificial Sequence
  Peptide Derived from Human Papillomavirus
NIGGRWTGR

SEQ ID NO: 42178 - protein, 9 aa, Artificial Sequence
  Peptide Derived from Human Papillomavirus
PAERPRKLH

SEQ ID NO: 42179 - protein, 9 aa, Artificial Sequence
  Peptide Derived from Human Papillomavirus
PLCPEEKQR

SEQ ID NO: 42180 - protein, 10 aa, Artificial Sequence
  Peptide Derived from Human Papillomavirus
PLCPEEKQRH

SEQ ID NO: 42181 - protein, 8 aa, Artificial Sequence
  Peptide Derived from Human Papillomavirus
RCIACWRR

SEQ ID NO: 42182 - protein, 10 aa, Artificial Sequence
  Peptide Derived from Human Papillomavirus
RCIACWRRPR

SEQ ID NO: 42183 - protein, 11 aa, Artificial Sequence
  Peptide Derived from Human Papillomavirus
RDDTPHGVCTK

SEQ ID NO: 42184 - protein, 8 aa, Artificial Sequence
  Peptide Derived from Human Papillomavirus
RFHNIGGR

SEQ ID NO: 42185 - protein, 10 aa, Artificial Sequence
  Peptide Derived from Human Papillomavirus
RFYSKVSEFR

SEQ ID NO: 42186 - protein, 8 aa, Artificial Sequence
  Peptide Derived from Human Papillomavirus
RLNCVYCK

SEQ ID NO: 42187 - protein, 11 aa, Artificial Sequence
  Peptide Derived from Human Papillomavirus
SALEIPYDELR

SEQ ID NO: 42188 - protein, 8 aa, Artificial Sequence
  Peptide Derived from Human Papillomavirus
SSALEIPY

SEQ ID NO: 42189 - protein, 9 aa, Artificial Sequence
  Peptide Derived from Human Papillomavirus
SVYGTTLEK

SEQ ID NO: 42190 - protein, 11 aa, Artificial Sequence
  Peptide Derived from Human Papillomavirus
TCQRPLCPEEK

SEQ ID NO: 42191 - protein, 8 aa, Artificial Sequence
  Peptide Derived from Human Papillomavirus
TDLTIVYR

SEQ ID NO: 42192 - protein, 9 aa, Artificial Sequence
  Peptide Derived from Human Papillomavirus
TGRCIACWR

SEQ ID NO: 42193 - protein, 10 aa, Artificial Sequence
  Peptide Derived from Human Papillomavirus
TGRCIACWRR

SEQ ID NO: 42194 - protein, 10 aa, Artificial Sequence
  Peptide Derived from Human Papillomavirus
TIVYRDDTPH

SEQ ID NO: 42195 - protein, 8 aa, Artificial Sequence
  Peptide Derived from Human Papillomavirus
TLEKLTNK

SEQ ID NO: 42196 - protein, 11 aa, Artificial Sequence
  Peptide Derived from Human Papillomavirus
TNKGICDLLIR

SEQ ID NO: 42197 - protein, 9 aa, Artificial Sequence
  Peptide Derived from Human Papillomavirus
TTLEKLTNK

SEQ ID NO: 42198 - protein, 9 aa, Artificial Sequence
  Peptide Derived from Human Papillomavirus
VCTKCLRFY

SEQ ID NO: 42199 - protein, 11 aa, Artificial Sequence
  Peptide Derived from Human Papillomavirus
VCTKCLRFYSK

SEQ ID NO: 42200 - protein, 8 aa, Artificial Sequence
  Peptide Derived from Human Papillomavirus
VSEFRWYR

SEQ ID NO: 42201 - protein, 9 aa, Artificial Sequence
  Peptide Derived from Human Papillomavirus
VSEFRWYRY

SEQ ID NO: 42202 - protein, 10 aa, Artificial Sequence
  Peptide Derived from Human Papillomavirus
WTGRCIACWR

SEQ ID NO: 42203 - protein, 11 aa, Artificial Sequence
  Peptide Derived from Human Papillomavirus
WTGRCIACWRR

SEQ ID NO: 42204 - protein, 10 aa, Artificial Sequence
  Peptide Derived from Human Papillomavirus
YDELRLNCVY

SEQ ID NO: 42205 - protein, 11 aa, Artificial Sequence
  Peptide Derived from Human Papillomavirus
YGTTLEKLTNK

SEQ ID NO: 42206 - protein, 8 aa, Artificial Sequence
  Peptide Derived from Human Papillomavirus
YSKVSEFR

SEQ ID NO: 42207 - protein, 10 aa, Artificial Sequence
  Peptide Derived from Human Papillomavirus
YSKVSEFRWY

SEQ ID NO: 42208 - protein, 11 aa, Artificial Sequence
  Peptide Derived from Human Papillomavirus
YSKVSEFRWYR

SEQ ID NO: 42209 - protein, 10 aa, Artificial Sequence
  Peptide Derived from Human Papillomavirus
YSVYGTTLEK

SEQ ID NO: 42210 - protein, 11 aa, Artificial Sequence
  Peptide Derived from Human Papillomavirus
AGQAEPDTSNY

SEQ ID NO: 42211 - protein, 9 aa, Artificial Sequence
  Peptide Derived from Human Papillomavirus
CCQCKSTLR

SEQ ID NO: 42212 - protein, 10 aa, Artificial Sequence
  Peptide Derived from Human Papillomavirus
CVQSTQVDIR

SEQ ID NO: 42213 - protein, 10 aa, Artificial Sequence
  Peptide Derived from Human Papillomavirus
DLQPEATDLH

SEQ ID NO: 42214 - protein, 8 aa, Artificial Sequence
  Peptide Derived from Human Papillomavirus
EATDLHCY

SEQ ID NO: 42215 - protein, 8 aa, Artificial Sequence
  Peptide Derived from Human Papillomavirus
ETPTLQDY

SEQ ID NO: 42216 - protein, 10 aa, Artificial Sequence
  Peptide Derived from Human Papillomavirus
FCCQCKSTLR

SEQ ID NO: 42217 - protein, 11 aa, Artificial Sequence
  Peptide Derived from Human Papillomavirus
FGIVCPNCSTR

SEQ ID NO: 42218 - protein, 10 aa, Artificial Sequence
  Peptide Derived from Human Papillomavirus
GIVCPNCSTR

SEQ ID NO: 42219 - protein, 9 aa, Artificial Sequence
  Peptide Derived from Human Papillomavirus
IVCPNCSTR

SEQ ID NO: 42220 - protein, 9 aa, Artificial Sequence
  Peptide Derived from Human Papillomavirus
IVTFCCQCK

SEQ ID NO: 42221 - protein, 11 aa, Artificial Sequence
  Peptide Derived from Human Papillomavirus
LCVQSTQVDIR

SEQ ID NO: 42222 - protein, 11 aa, Artificial Sequence
  Peptide Derived from Human Papillomavirus
LDLQPEATDLH

SEQ ID NO: 42223 - protein, 10 aa, Artificial Sequence
  Peptide Derived from Human Papillomavirus
NIVTFCCQCK

SEQ ID NO: 42224 - protein, 9 aa, Artificial Sequence
  Peptide Derived from Human Papillomavirus
QAEPDTSNY

SEQ ID NO: 42225 - protein, 8 aa, Artificial Sequence
  Peptide Derived from Human Papillomavirus
QSTQVDIR

SEQ ID NO: 42226 - protein, 10 aa, Artificial Sequence
  Peptide Derived from Human Papillomavirus
RGETPTLQDY

SEQ ID NO: 42227 - protein, 11 aa, Artificial Sequence
  Peptide Derived from Human Papillomavirus
TFCCQCKSTLR

SEQ ID NO: 42228 - protein, 8 aa, Artificial Sequence
  Peptide Derived from Human Papillomavirus
VCPNCSTR

SEQ ID NO: 42229 - protein, 8 aa, Artificial Sequence
  Peptide Derived from Human Papillomavirus
VTFCCQCK

SEQ ID NO: 42230 - protein, 11 aa, Artificial Sequence
  Peptide Derived from Human Papillomavirus
YNIVTFCCQCK

SEQ ID NO: 42231 - protein, 11 aa, Artificial Sequence
  Peptide Derived from Human Papillomavirus
AAIANSDTTFK

SEQ ID NO: 42232 - protein, 9 aa, Artificial Sequence
  Peptide Derived from Human Papillomavirus
ACVGLEVGR

SEQ ID NO: 42233 - protein, 8 aa, Artificial Sequence
  Peptide Derived from Human Papillomavirus
ADIMTYIH

SEQ ID NO: 42234 - protein, 10 aa, Artificial Sequence
  Peptide Derived from Human Papillomavirus
ADLDQFPLGR

SEQ ID NO: 42235 - protein, 11 aa, Artificial Sequence
  Peptide Derived from Human Papillomavirus
ADLDQFPLGRK

SEQ ID NO: 42236 - protein, 9 aa, Artificial Sequence
  Peptide Derived from Human Papillomavirus
AGGPGTDNR

SEQ ID NO: 42237 - protein, 11 aa, Artificial Sequence
  Peptide Derived from Human Papillomavirus
AGSARLLTVGH

SEQ ID NO: 42238 - protein, 8 aa, Artificial Sequence
  Peptide Derived from Human Papillomavirus
AGYRARPK

SEQ ID NO: 42239 - protein, 10 aa, Artificial Sequence
  Peptide Derived from Human Papillomavirus
AGYRARPKFK

SEQ ID NO: 42240 - protein, 10 aa, Artificial Sequence
  Peptide Derived from Human Papillomavirus
AIANSDTTFK

SEQ ID NO: 42241 - protein, 11 aa, Artificial Sequence
  Peptide Derived from Human Papillomavirus
AITCQKTAPQK

SEQ ID NO: 42242 - protein, 11 aa, Artificial Sequence
  Peptide Derived from Human Papillomavirus
AMDFTALQDTK

SEQ ID NO: 42243 - protein, 8 aa, Artificial Sequence
  Peptide Derived from Human Papillomavirus
ANSDTTFK

SEQ ID NO: 42244 - protein, 8 aa, Artificial Sequence
  Peptide Derived from Human Papillomavirus
ASTTTPAK

SEQ ID NO: 42245 - protein, 9 aa, Artificial Sequence
  Peptide Derived from Human Papillomavirus
ASTTTPAKR

SEQ ID NO: 42246 - protein, 10 aa, Artificial Sequence
  Peptide Derived from Human Papillomavirus
ASTTTPAKRK

SEQ ID NO: 42247 - protein, 11 aa, Artificial Sequence
  Peptide Derived from Human Papillomavirus
ASTTTPAKRKK

SEQ ID NO: 42248 - protein, 8 aa, Artificial Sequence
  Peptide Derived from Human Papillomavirus
ATLANSTY

SEQ ID NO: 42249 - protein, 10 aa, Artificial Sequence
  Peptide Derived from Human Papillomavirus
CNSICKYPDY

SEQ ID NO: 42250 - protein, 8 aa, Artificial Sequence
  Peptide Derived from Human Papillomavirus
CVGLEVGR

SEQ ID NO: 42251 - protein, 9 aa, Artificial Sequence
  Peptide Derived from Human Papillomavirus
DAQIFNKPY

SEQ ID NO: 42252 - protein, 8 aa, Artificial Sequence
  Peptide Derived from Human Papillomavirus
DCPPLELK

SEQ ID NO: 42253 - protein, 8 aa, Artificial Sequence
  Peptide Derived from Human Papillomavirus
DDTENSNR

SEQ ID NO: 42254 - protein, 9 aa, Artificial Sequence
  Peptide Derived from Human Papillomavirus
DDTENSNRY

SEQ ID NO: 42255 - protein, 9 aa, Artificial Sequence
  Peptide Derived from Human Papillomavirus
DFTALQDTK

SEQ ID NO: 42256 - protein, 8 aa, Artificial Sequence
  Peptide Derived from Human Papillomavirus
DICNSICK

SEQ ID NO: 42257 - protein, 9 aa, Artificial Sequence
  Peptide Derived from Human Papillomavirus
DICNSICKY

SEQ ID NO: 42258 - protein, 9 aa, Artificial Sequence
  Peptide Derived from Human Papillomavirus
DLDQFPLGR

SEQ ID NO: 42259 - protein, 10 aa, Artificial Sequence
  Peptide Derived from Human Papillomavirus
DLDQFPLGRK

SEQ ID NO: 42260 - protein, 10 aa, Artificial Sequence
  Peptide Derived from Human Papillomavirus
DLQFIFQLCK

SEQ ID NO: 42261 - protein, 10 aa, Artificial Sequence
  Peptide Derived from Human Papillomavirus
DNPKKIVVPK

SEQ ID NO: 42262 - protein, 10 aa, Artificial Sequence
  Peptide Derived from Human Papillomavirus
DNRECISMDY

SEQ ID NO: 42263 - protein, 11 aa, Artificial Sequence
  Peptide Derived from Human Papillomavirus
DNRECISMDYK

SEQ ID NO: 42264 - protein, 8 aa, Artificial Sequence
  Peptide Derived from Human Papillomavirus
DTENSNRY

SEQ ID NO: 42265 - protein, 8 aa, Artificial Sequence
  Peptide Derived from Human Papillomavirus
DTLFFYLR

SEQ ID NO: 42266 - protein, 9 aa, Artificial Sequence
  Peptide Derived from Human Papillomavirus
DTLFFYLRR

SEQ ID NO: 42267 - protein, 11 aa, Artificial Sequence
  Peptide Derived from Human Papillomavirus
DTSFYNPETQR

SEQ ID NO: 42268 - protein, 10 aa, Artificial Sequence
  Peptide Derived from Human Papillomavirus
DTTFKSSNFK

SEQ ID NO: 42269 - protein, 8 aa, Artificial Sequence
  Peptide Derived from Human Papillomavirus
ECISMDYK

SEQ ID NO: 42270 - protein, 8 aa, Artificial Sequence
  Peptide Derived from Human Papillomavirus
ESVPTDLY

SEQ ID NO: 42271 - protein, 10 aa, Artificial Sequence
  Peptide Derived from Human Papillomavirus
ESVPTDLYIK

SEQ ID NO: 42272 - protein, 9 aa, Artificial Sequence
  Peptide Derived from Human Papillomavirus
FDDTENSNR

SEQ ID NO: 42273 - protein, 10 aa, Artificial Sequence
  Peptide Derived from Human Papillomavirus
FDDTENSNRY

SEQ ID NO: 42274 - protein, 11 aa, Artificial Sequence
  Peptide Derived from Human Papillomavirus
FDLQFIFQLCK

SEQ ID NO: 42275 - protein, 9 aa, Artificial Sequence
  Peptide Derived from Human Papillomavirus
FGFPDTSFY

SEQ ID NO: 42276 - protein, 8 aa, Artificial Sequence
  Peptide Derived from Human Papillomavirus
FLLQAGYR

SEQ ID NO: 42277 - protein, 10 aa, Artificial Sequence
  Peptide Derived from Human Papillomavirus
FLLQAGYRAR

SEQ ID NO: 42278 - protein, 9 aa, Artificial Sequence
  Peptide Derived from Human Papillomavirus
FNKPYWMQR

SEQ ID NO: 42279 - protein, 8 aa, Artificial Sequence
  Peptide Derived from Human Papillomavirus
FTALQDTK

SEQ ID NO: 42280 - protein, 8 aa, Artificial Sequence
  Peptide Derived from Human Papillomavirus
FVRHFFNR

SEQ ID NO: 42281 - protein, 11 aa, Artificial Sequence
  Peptide Derived from Human Papillomavirus
FVTSQAITCQK

SEQ ID NO: 42282 - protein, 9 aa, Artificial Sequence
  Peptide Derived from Human Papillomavirus
FVTVVDTTR

SEQ ID NO: 42283 - protein, 9 aa, Artificial Sequence
  Peptide Derived from Human Papillomavirus
GCKPPIGEH

SEQ ID NO: 42284 - protein, 9 aa, Artificial Sequence
  Peptide Derived from Human Papillomavirus
GDCPPLELK

SEQ ID NO: 42285 - protein, 9 aa, Artificial Sequence
  Peptide Derived from Human Papillomavirus
GDTLFFYLR

SEQ ID NO: 42286 - protein, 10 aa, Artificial Sequence
  Peptide Derived from Human Papillomavirus
GDTLFFYLRR

SEQ ID NO: 42287 - protein, 8 aa, Artificial Sequence
  Peptide Derived from Human Papillomavirus
GFPDTSFY

SEQ ID NO: 42288 - protein, 8 aa, Artificial Sequence
  Peptide Derived from Human Papillomavirus
GGPGTDNR

SEQ ID NO: 42289 - protein, 10 aa, Artificial Sequence
  Peptide Derived from Human Papillomavirus
GISGHPLLNK

SEQ ID NO: 42290 - protein, 8 aa, Artificial Sequence
  Peptide Derived from Human Papillomavirus
GLQYRVFR

SEQ ID NO: 42291 - protein, 10 aa, Artificial Sequence
  Peptide Derived from Human Papillomavirus
GLQYRVFRVR

SEQ ID NO: 42292 - protein, 10 aa, Artificial Sequence
  Peptide Derived from Human Papillomavirus
GSARLLTVGH

SEQ ID NO: 42293 - protein, 8 aa, Artificial Sequence
  Peptide Derived from Human Papillomavirus
GSLEDTYR

SEQ ID NO: 42294 - protein, 11 aa, Artificial Sequence
  Peptide Derived from Human Papillomavirus
GSTATLANSTY

SEQ ID NO: 42295 - protein, 9 aa, Artificial Sequence
  Peptide Derived from Human Papillomavirus
IANSDTTFK

SEQ ID NO: 42296 - protein, 9 aa, Artificial Sequence
  Peptide Derived from Human Papillomavirus
ICKYPDYLK

SEQ ID NO: 42297 - protein, 8 aa, Artificial Sequence
  Peptide Derived from Human Papillomavirus
ICNSICKY

SEQ ID NO: 42298 - protein, 11 aa, Artificial Sequence
  Peptide Derived from Human Papillomavirus
ICNSICKYPDY

SEQ ID NO: 42299 - protein, 10 aa, Artificial Sequence
  Peptide Derived from Human Papillomavirus
IFNKPYWMQR

SEQ ID NO: 42300 - protein, 9 aa, Artificial Sequence
  Peptide Derived from Human Papillomavirus
ISGHPLLNK

SEQ ID NO: 42301 - protein, 10 aa, Artificial Sequence
  Peptide Derived from Human Papillomavirus
ITCQKTAPQK

SEQ ID NO: 42302 - protein, 10 aa, Artificial Sequence
  Peptide Derived from Human Papillomavirus
ITLSADIMTY

SEQ ID NO: 42303 - protein, 11 aa, Artificial Sequence
  Peptide Derived from Human Papillomavirus
IVVPKVSGLQY

SEQ ID NO: 42304 - protein, 11 aa, Artificial Sequence
  Peptide Derived from Human Papillomavirus
KDYVFWEVNLK

SEQ ID NO: 42305 - protein, 10 aa, Artificial Sequence
  Peptide Derived from Human Papillomavirus
KFDDTENSNR

SEQ ID NO: 42306 - protein, 11 aa, Artificial Sequence
  Peptide Derived from Human Papillomavirus
KFDDTENSNRY

SEQ ID NO: 42307 - protein, 10 aa, Artificial Sequence
  Peptide Derived from Human Papillomavirus
KFGFPDTSFY

SEQ ID NO: 42308 - protein, 8 aa, Artificial Sequence
  Peptide Derived from Human Papillomavirus
KFLLQAGY

SEQ ID NO: 42309 - protein, 9 aa, Artificial Sequence
  Peptide Derived from Human Papillomavirus
KFLLQAGYR

SEQ ID NO: 42310 - protein, 11 aa, Artificial Sequence
  Peptide Derived from Human Papillomavirus
KFLLQAGYRAR

SEQ ID NO: 42311 - protein, 11 aa, Artificial Sequence
  Peptide Derived from Human Papillomavirus
KITLSADIMTY

SEQ ID NO: 42312 - protein, 8 aa, Artificial Sequence
  Peptide Derived from Human Papillomavirus
KSSNFKEY

SEQ ID NO: 42313 - protein, 10 aa, Artificial Sequence
  Peptide Derived from Human Papillomavirus
KSSNFKEYLR

SEQ ID NO: 42314 - protein, 11 aa, Artificial Sequence
  Peptide Derived from Human Papillomavirus
KSSNFKEYLRH

SEQ ID NO: 42315 - protein, 8 aa, Artificial Sequence
  Peptide Derived from Human Papillomavirus
KTAPQKPK

SEQ ID NO: 42316 - protein, 8 aa, Artificial Sequence
  Peptide Derived from Human Papillomavirus
KVSGLQYR

SEQ ID NO: 42317 - protein, 11 aa, Artificial Sequence
  Peptide Derived from Human Papillomavirus
KVSGLQYRVFR

SEQ ID NO: 42318 - protein, 8 aa, Artificial Sequence
  Peptide Derived from Human Papillomavirus
KVVSTDEY

SEQ ID NO: 42319 - protein, 11 aa, Artificial Sequence
  Peptide Derived from Human Papillomavirus
KVVSTDEYVTR

SEQ ID NO: 42320 - protein, 9 aa, Artificial Sequence
  Peptide Derived from Human Papillomavirus
LDICNSICK

SEQ ID NO: 42321 - protein, 10 aa, Artificial Sequence
  Peptide Derived from Human Papillomavirus
LDICNSICKY

SEQ ID NO: 42322 - protein, 8 aa, Artificial Sequence
  Peptide Derived from Human Papillomavirus
LDQFPLGR

SEQ ID NO: 42323 - protein, 9 aa, Artificial Sequence
  Peptide Derived from Human Papillomavirus
LDQFPLGRK

SEQ ID NO: 42324 - protein, 10 aa, Artificial Sequence
  Peptide Derived from Human Papillomavirus
LFVTVVDTTR

SEQ ID NO: 42325 - protein, 10 aa, Artificial Sequence
  Peptide Derived from Human Papillomavirus
LGCKPPIGEH

SEQ ID NO: 42326 - protein, 11 aa, Artificial Sequence
  Peptide Derived from Human Papillomavirus
LGRKFLLQAGY

SEQ ID NO: 42327 - protein, 8 aa, Artificial Sequence
  Peptide Derived from Human Papillomavirus
LGVGISGH

SEQ ID NO: 42328 - protein, 11 aa, Artificial Sequence
  Peptide Derived from Human Papillomavirus
LLGCKPPIGEH

SEQ ID NO: 42329 - protein, 9 aa, Artificial Sequence
  Peptide Derived from Human Papillomavirus
LLQAGYRAR

SEQ ID NO: 42330 - protein, 11 aa, Artificial Sequence
  Peptide Derived from Human Papillomavirus
LLQAGYRARPK

SEQ ID NO: 42331 - protein, 8 aa, Artificial Sequence
  Peptide Derived from Human Papillomavirus
LLTVGHPY

SEQ ID NO: 42332 - protein, 9 aa, Artificial Sequence
  Peptide Derived from Human Papillomavirus
LLTVGHPYY

SEQ ID NO: 42333 - protein, 8 aa, Artificial Sequence
  Peptide Derived from Human Papillomavirus
LSADIMTY

SEQ ID NO: 42334 - protein, 10 aa, Artificial Sequence
  Peptide Derived from Human Papillomavirus
LSADIMTYIH

SEQ ID NO: 42335 - protein, 8 aa, Artificial Sequence
  Peptide Derived from Human Papillomavirus
LTVGHPYY

SEQ ID NO: 42336 - protein, 10 aa, Artificial Sequence
  Peptide Derived from Human Papillomavirus
MDFTALQDTK

SEQ ID NO: 42337 - protein, 9 aa, Artificial Sequence
  Peptide Derived from Human Papillomavirus
MFVRHFFNR

SEQ ID NO: 42338 - protein, 11 aa, Artificial Sequence
  Peptide Derived from Human Papillomavirus
MVTSDAQIFNK

SEQ ID NO: 42339 - protein, 8 aa, Artificial Sequence
  Peptide Derived from Human Papillomavirus
NFKEYLRH

SEQ ID NO: 42340 - protein, 10 aa, Artificial Sequence
  Peptide Derived from Human Papillomavirus
NIYYHAGSAR

SEQ ID NO: 42341 - protein, 9 aa, Artificial Sequence
  Peptide Derived from Human Papillomavirus
NSICKYPDY

SEQ ID NO: 42342 - protein, 11 aa, Artificial Sequence
  Peptide Derived from Human Papillomavirus
NSICKYPDYLK

SEQ ID NO: 42343 - protein, 8 aa, Artificial Sequence
  Peptide Derived from Human Papillomavirus
PAKRKKTK

SEQ ID NO: 42344 - protein, 9 aa, Artificial Sequence
  Peptide Derived from Human Papillomavirus
PAKRKKTKK

SEQ ID NO: 42345 - protein, 11 aa, Artificial Sequence
  Peptide Derived from Human Papillomavirus
PDYLKMVAEPY

SEQ ID NO: 42346 - protein, 10 aa, Artificial Sequence
  Peptide Derived from Human Papillomavirus
PGDCPPLELK

SEQ ID NO: 42347 - protein, 8 aa, Artificial Sequence
  Peptide Derived from Human Papillomavirus
PIGEHWGK

SEQ ID NO: 42348 - protein, 10 aa, Artificial Sequence
  Peptide Derived from Human Papillomavirus
PLDICNSICK

SEQ ID NO: 42349 - protein, 11 aa, Artificial Sequence
  Peptide Derived from Human Papillomavirus
PLDICNSICKY

SEQ ID NO: 42350 - protein, 9 aa, Artificial Sequence
  Peptide Derived from Human Papillomavirus
PLGVGISGH

SEQ ID NO: 42351 - protein, 10 aa, Artificial Sequence
  Peptide Derived from Human Papillomavirus
PSASTTTPAK

SEQ ID NO: 42352 - protein, 11 aa, Artificial Sequence
  Peptide Derived from Human Papillomavirus
PSASTTTPAKR

SEQ ID NO: 42353 - protein, 9 aa, Artificial Sequence
  Peptide Derived from Human Papillomavirus
PSGSLEDTY

SEQ ID NO: 42354 - protein, 10 aa, Artificial Sequence
  Peptide Derived from Human Papillomavirus
PSGSLEDTYR

SEQ ID NO: 42355 - protein, 11 aa, Artificial Sequence
  Peptide Derived from Human Papillomavirus
PVSKVVSTDEY

SEQ ID NO: 42356 - protein, 9 aa, Artificial Sequence
  Peptide Derived from Human Papillomavirus
QAGYRARPK

SEQ ID NO: 42357 - protein, 11 aa, Artificial Sequence
  Peptide Derived from Human Papillomavirus
QAGYRARPKFK

SEQ ID NO: 42358 - protein, 8 aa, Artificial Sequence
  Peptide Derived from Human Papillomavirus
QFIFQLCK

SEQ ID NO: 42359 - protein, 11 aa, Artificial Sequence
  Peptide Derived from Human Papillomavirus
QIFNKPYWMQR

SEQ ID NO: 42360 - protein, 8 aa, Artificial Sequence
  Peptide Derived from Human Papillomavirus
QLCLLGCK

SEQ ID NO: 42361 - protein, 11 aa, Artificial Sequence
  Peptide Derived from Human Papillomavirus
QLFVTVVDTTR

SEQ ID NO: 42362 - protein, 10 aa, Artificial Sequence
  Peptide Derived from Human Papillomavirus
QMFVRHFFNR

SEQ ID NO: 42363 - protein, 10 aa, Artificial Sequence
  Peptide Derived from Human Papillomavirus
QTQLCLLGCK

SEQ ID NO: 42364 - protein, 10 aa, Artificial Sequence
  Peptide Derived from Human Papillomavirus
RARPKFKAGK

SEQ ID NO: 42365 - protein, 11 aa, Artificial Sequence
  Peptide Derived from Human Papillomavirus
RARPKFKAGKR

SEQ ID NO: 42366 - protein, 9 aa, Artificial Sequence
  Peptide Derived from Human Papillomavirus
RLLTVGHPY

SEQ ID NO: 42367 - protein, 10 aa, Artificial Sequence
  Peptide Derived from Human Papillomavirus
RLLTVGHPYY

SEQ ID NO: 42368 - protein, 9 aa, Artificial Sequence
  Peptide Derived from Human Papillomavirus
RVRLPDPNK

SEQ ID NO: 42369 - protein, 9 aa, Artificial Sequence
  Peptide Derived from Human Papillomavirus
SADIMTYIH

SEQ ID NO: 42370 - protein, 11 aa, Artificial Sequence
  Peptide Derived from Human Papillomavirus
SADLDQFPLGR

SEQ ID NO: 42371 - protein, 9 aa, Artificial Sequence
  Peptide Derived from Human Papillomavirus
SARLLTVGH

SEQ ID NO: 42372 - protein, 11 aa, Artificial Sequence
  Peptide Derived from Human Papillomavirus
SARLLTVGHPY

SEQ ID NO: 42373 - protein, 9 aa, Artificial Sequence
  Peptide Derived from Human Papillomavirus
SASTTTPAK

SEQ ID NO: 42374 - protein, 10 aa, Artificial Sequence
  Peptide Derived from Human Papillomavirus
SASTTTPAKR

SEQ ID NO: 42375 - protein, 11 aa, Artificial Sequence
  Peptide Derived from Human Papillomavirus
SASTTTPAKRK

SEQ ID NO: 42376 - protein, 8 aa, Artificial Sequence
  Peptide Derived from Human Papillomavirus
SDAQIFNK

SEQ ID NO: 42377 - protein, 10 aa, Artificial Sequence
  Peptide Derived from Human Papillomavirus
SDAQIFNKPY

SEQ ID NO: 42378 - protein, 11 aa, Artificial Sequence
  Peptide Derived from Human Papillomavirus
SDNPKKIVVPK

SEQ ID NO: 42379 - protein, 11 aa, Artificial Sequence
  Peptide Derived from Human Papillomavirus
SDTTFKSSNFK

SEQ ID NO: 42380 - protein, 9 aa, Artificial Sequence
  Peptide Derived from Human Papillomavirus
SFYNPETQR

SEQ ID NO: 42381 - protein, 8 aa, Artificial Sequence
  Peptide Derived from Human Papillomavirus
SGHPLLNK

SEQ ID NO: 42382 - protein, 9 aa, Artificial Sequence
  Peptide Derived from Human Papillomavirus
SGLQYRVFR

SEQ ID NO: 42383 - protein, 11 aa, Artificial Sequence
  Peptide Derived from Human Papillomavirus
SGLQYRVFRVR

SEQ ID NO: 42384 - protein, 8 aa, Artificial Sequence
  Peptide Derived from Human Papillomavirus
SGSLEDTY

SEQ ID NO: 42385 - protein, 9 aa, Artificial Sequence
  Peptide Derived from Human Papillomavirus
SGSLEDTYR

SEQ ID NO: 42386 - protein, 8 aa, Artificial Sequence
  Peptide Derived from Human Papillomavirus
SICKYPDY

SEQ ID NO: 42387 - protein, 10 aa, Artificial Sequence
  Peptide Derived from Human Papillomavirus
SICKYPDYLK

SEQ ID NO: 42388 - protein, 9 aa, Artificial Sequence
  Peptide Derived from Human Papillomavirus
SIPKSDNPK

SEQ ID NO: 42389 - protein, 10 aa, Artificial Sequence
  Peptide Derived from Human Papillomavirus
SIPKSDNPKK

SEQ ID NO: 42390 - protein, 11 aa, Artificial Sequence
  Peptide Derived from Human Papillomavirus
SLWRPSEATVY

SEQ ID NO: 42391 - protein, 8 aa, Artificial Sequence
  Peptide Derived from Human Papillomavirus
SNFKEYLR

SEQ ID NO: 42392 - protein, 9 aa, Artificial Sequence
  Peptide Derived from Human Papillomavirus
SNFKEYLRH

SEQ ID NO: 42393 - protein, 9 aa, Artificial Sequence
  Peptide Derived from Human Papillomavirus
SSNFKEYLR

SEQ ID NO: 42394 - protein, 10 aa, Artificial Sequence
  Peptide Derived from Human Papillomavirus
SSNFKEYLRH

SEQ ID NO: 42395 - protein, 10 aa, Artificial Sequence
  Peptide Derived from Human Papillomavirus
STATLANSTY

SEQ ID NO: 42396 - protein, 8 aa, Artificial Sequence
  Peptide Derived from Human Papillomavirus
STDEYVTR

SEQ ID NO: 42397 - protein, 8 aa, Artificial Sequence
  Peptide Derived from Human Papillomavirus
STTTPAKR

SEQ ID NO: 42398 - protein, 9 aa, Artificial Sequence
  Peptide Derived from Human Papillomavirus
STTTPAKRK

SEQ ID NO: 42399 - protein, 10 aa, Artificial Sequence
  Peptide Derived from Human Papillomavirus
STTTPAKRKK

SEQ ID NO: 42400 - protein, 9 aa, Artificial Sequence
  Peptide Derived from Human Papillomavirus
SVPTDLYIK

SEQ ID NO: 42401 - protein, 9 aa, Artificial Sequence
  Peptide Derived from Human Papillomavirus
TATLANSTY

SEQ ID NO: 42402 - protein, 9 aa, Artificial Sequence
  Peptide Derived from Human Papillomavirus
TCQKTAPQK

SEQ ID NO: 42403 - protein, 11 aa, Artificial Sequence
  Peptide Derived from Human Papillomavirus
TCQKTAPQKPK

SEQ ID NO: 42404 - protein, 11 aa, Artificial Sequence
  Peptide Derived from Human Papillomavirus
TDEYVTRTNIY

SEQ ID NO: 42405 - protein, 11 aa, Artificial Sequence
  Peptide Derived from Human Papillomavirus
TDNRECISMDY

SEQ ID NO: 42406 - protein, 8 aa, Artificial Sequence
  Peptide Derived from Human Papillomavirus
TFKSSNFK

SEQ ID NO: 42407 - protein, 10 aa, Artificial Sequence
  Peptide Derived from Human Papillomavirus
TFKSSNFKEY

SEQ ID NO: 42408 - protein, 8 aa, Artificial Sequence
  Peptide Derived from Human Papillomavirus
TLFFYLRR

SEQ ID NO: 42409 - protein, 9 aa, Artificial Sequence
  Peptide Derived from Human Papillomavirus
TLSADIMTY

SEQ ID NO: 42410 - protein, 11 aa, Artificial Sequence
  Peptide Derived from Human Papillomavirus
TLSADIMTYIH

SEQ ID NO: 42411 - protein, 11 aa, Artificial Sequence
  Peptide Derived from Human Papillomavirus
TNIYYHAGSAR

SEQ ID NO: 42412 - protein, 9 aa, Artificial Sequence
  Peptide Derived from Human Papillomavirus
TSDAQIFNK

SEQ ID NO: 42413 - protein, 11 aa, Artificial Sequence
  Peptide Derived from Human Papillomavirus
TSDAQIFNKPY

SEQ ID NO: 42414 - protein, 10 aa, Artificial Sequence
  Peptide Derived from Human Papillomavirus
TSFYNPETQR

SEQ ID NO: 42415 - protein, 9 aa, Artificial Sequence
  Peptide Derived from Human Papillomavirus
TSQAITCQK

SEQ ID NO: 42416 - protein, 9 aa, Artificial Sequence
  Peptide Derived from Human Papillomavirus
TTFKSSNFK

SEQ ID NO: 42417 - protein, 11 aa, Artificial Sequence
  Peptide Derived from Human Papillomavirus
TTFKSSNFKEY

SEQ ID NO: 42418 - protein, 8 aa, Artificial Sequence
  Peptide Derived from Human Papillomavirus
TTPAKRKK

SEQ ID NO: 42419 - protein, 10 aa, Artificial Sequence
  Peptide Derived from Human Papillomavirus
TTPAKRKKTK

SEQ ID NO: 42420 - protein, 11 aa, Artificial Sequence
  Peptide Derived from Human Papillomavirus
TTPAKRKKTKK

SEQ ID NO: 42421 - protein, 8 aa, Artificial Sequence
  Peptide Derived from Human Papillomavirus
TTTPAKRK

SEQ ID NO: 42422 - protein, 9 aa, Artificial Sequence
  Peptide Derived from Human Papillomavirus
TTTPAKRKK

SEQ ID NO: 42423 - protein, 11 aa, Artificial Sequence
  Peptide Derived from Human Papillomavirus
TTTPAKRKKTK

SEQ ID NO: 42424 - protein, 11 aa, Artificial Sequence
  Peptide Derived from Human Papillomavirus
TVGESVPTDLY

SEQ ID NO: 42425 - protein, 11 aa, Artificial Sequence
  Peptide Derived from Human Papillomavirus
TVGHPYYSIPK

SEQ ID NO: 42426 - protein, 11 aa, Artificial Sequence
  Peptide Derived from Human Papillomavirus
TVYLPPVPVSK

SEQ ID NO: 42427 - protein, 11 aa, Artificial Sequence
  Peptide Derived from Human Papillomavirus
VFRVRLPDPNK

SEQ ID NO: 42428 - protein, 8 aa, Artificial Sequence
  Peptide Derived from Human Papillomavirus
VFWEVNLK

SEQ ID NO: 42429 - protein, 10 aa, Artificial Sequence
  Peptide Derived from Human Papillomavirus
VFWEVNLKEK

SEQ ID NO: 42430 - protein, 10 aa, Artificial Sequence
  Peptide Derived from Human Papillomavirus
VGESVPTDLY

SEQ ID NO: 42431 - protein, 10 aa, Artificial Sequence
  Peptide Derived from Human Papillomavirus
VGHPYYSIPK

SEQ ID NO: 42432 - protein, 11 aa, Artificial Sequence
  Peptide Derived from Human Papillomavirus
VGISGHPLLNK

SEQ ID NO: 42433 - protein, 10 aa, Artificial Sequence
  Peptide Derived from Human Papillomavirus
VSGLQYRVFR

SEQ ID NO: 42434 - protein, 10 aa, Artificial Sequence
  Peptide Derived from Human Papillomavirus
VSKVVSTDEY

SEQ ID NO: 42435 - protein, 9 aa, Artificial Sequence
  Peptide Derived from Human Papillomavirus
VSTDEYVTR

SEQ ID NO: 42436 - protein, 8 aa, Artificial Sequence
  Peptide Derived from Human Papillomavirus
VTRTNIYY

SEQ ID NO: 42437 - protein, 9 aa, Artificial Sequence
  Peptide Derived from Human Papillomavirus
VTRTNIYYH

SEQ ID NO: 42438 - protein, 10 aa, Artificial Sequence
  Peptide Derived from Human Papillomavirus
VTSDAQIFNK

SEQ ID NO: 42439 - protein, 10 aa, Artificial Sequence
  Peptide Derived from Human Papillomavirus
VTSQAITCQK

SEQ ID NO: 42440 - protein, 8 aa, Artificial Sequence
  Peptide Derived from Human Papillomavirus
VTVVDTTR

SEQ ID NO: 42441 - protein, 10 aa, Artificial Sequence
  Peptide Derived from Human Papillomavirus
VVPKVSGLQY

SEQ ID NO: 42442 - protein, 11 aa, Artificial Sequence
  Peptide Derived from Human Papillomavirus
VVPKVSGLQYR

SEQ ID NO: 42443 - protein, 10 aa, Artificial Sequence
  Peptide Derived from Human Papillomavirus
VVSTDEYVTR

SEQ ID NO: 42444 - protein, 10 aa, Artificial Sequence
  Peptide Derived from Human Papillomavirus
WACVGLEVGR

SEQ ID NO: 42445 - protein, 8 aa, Artificial Sequence
  Peptide Derived from Human Papillomavirus
WMQRAQGH

SEQ ID NO: 42446 - protein, 10 aa, Artificial Sequence
  Peptide Derived from Human Papillomavirus
YAGGPGTDNR

SEQ ID NO: 42447 - protein, 8 aa, Artificial Sequence
  Peptide Derived from Human Papillomavirus
YGDTLFFY

SEQ ID NO: 42448 - protein, 10 aa, Artificial Sequence
  Peptide Derived from Human Papillomavirus
YGDTLFFYLR

SEQ ID NO: 42449 - protein, 11 aa, Artificial Sequence
  Peptide Derived from Human Papillomavirus
YGDTLFFYLRR

SEQ ID NO: 42450 - protein, 9 aa, Artificial Sequence
  Peptide Derived from Human Papillomavirus
YLKMVAEPY

SEQ ID NO: 42451 - protein, 9 aa, Artificial Sequence
  Peptide Derived from Human Papillomavirus
YLPPVPVSK

SEQ ID NO: 42452 - protein, 10 aa, Artificial Sequence
  Peptide Derived from Human Papillomavirus
YLRREQMFVR

SEQ ID NO: 42453 - protein, 11 aa, Artificial Sequence
  Peptide Derived from Human Papillomavirus
YLRREQMFVRH

SEQ ID NO: 42454 - protein, 10 aa, Artificial Sequence
  Peptide Derived from Human Papillomavirus
YSIPKSDNPK

SEQ ID NO: 42455 - protein, 11 aa, Artificial Sequence
  Peptide Derived from Human Papillomavirus
YSIPKSDNPKK

SEQ ID NO: 42456 - protein, 9 aa, Artificial Sequence
  Peptide Derived from Human Papillomavirus
YVFWEVNLK

SEQ ID NO: 42457 - protein, 11 aa, Artificial Sequence
  Peptide Derived from Human Papillomavirus
YVFWEVNLKEK

SEQ ID NO: 42458 - protein, 8 aa, Artificial Sequence
  Peptide Derived from Human Papillomavirus
YVTRTNIY

SEQ ID NO: 42459 - protein, 9 aa, Artificial Sequence
  Peptide Derived from Human Papillomavirus
YVTRTNIYY

SEQ ID NO: 42460 - protein, 10 aa, Artificial Sequence
  Peptide Derived from Human Papillomavirus
YVTRTNIYYH

SEQ ID NO: 42461 - protein, 11 aa, Artificial Sequence
  Peptide Derived from Human Papillomavirus
AGTCPSDVIPK

SEQ ID NO: 42462 - protein, 11 aa, Artificial Sequence
  Peptide Derived from Human Papillomavirus
AILDVTSVSTH

SEQ ID NO: 42463 - protein, 10 aa, Artificial Sequence
  Peptide Derived from Human Papillomavirus
ALHRPALTSR

SEQ ID NO: 42464 - protein, 11 aa, Artificial Sequence
  Peptide Derived from Human Papillomavirus
ALHRPALTSRR

SEQ ID NO: 42465 - protein, 10 aa, Artificial Sequence
  Peptide Derived from Human Papillomavirus
ALTSRRNTVR

SEQ ID NO: 42466 - protein, 11 aa, Artificial Sequence
  Peptide Derived from Human Papillomavirus
ALTSRRNTVRY

SEQ ID NO: 42467 - protein, 11 aa, Artificial Sequence
  Peptide Derived from Human Papillomavirus
ASATQLYQTCK

SEQ ID NO: 42468 - protein, 8 aa, Artificial Sequence
  Peptide Derived from Human Papillomavirus
ATIGARVH

SEQ ID NO: 42469 - protein, 9 aa, Artificial Sequence
  Peptide Derived from Human Papillomavirus
ATIGARVHY

SEQ ID NO: 42470 - protein, 10 aa, Artificial Sequence
  Peptide Derived from Human Papillomavirus
ATIGARVHYY

SEQ ID NO: 42471 - protein, 11 aa, Artificial Sequence
  Peptide Derived from Human Papillomavirus
ATIGARVHYYY

SEQ ID NO: 42472 - protein, 9 aa, Artificial Sequence
  Peptide Derived from Human Papillomavirus
ATQLYQTCK

SEQ ID NO: 42473 - protein, 11 aa, Artificial Sequence
  Peptide Derived from Human Papillomavirus
AVQSTSAVSAY

SEQ ID NO: 42474 - protein, 9 aa, Artificial Sequence
  Peptide Derived from Human Papillomavirus
DFLDIIALH

SEQ ID NO: 42475 - protein, 10 aa, Artificial Sequence
  Peptide Derived from Human Papillomavirus
DFLDIIALHR

SEQ ID NO: 42476 - protein, 10 aa, Artificial Sequence
  Peptide Derived from Human Papillomavirus
DFTVDTPATH

SEQ ID NO: 42477 - protein, 8 aa, Artificial Sequence
  Peptide Derived from Human Papillomavirus
DFYLHPSY

SEQ ID NO: 42478 - protein, 9 aa, Artificial Sequence
  Peptide Derived from Human Papillomavirus
DFYLHPSYY

SEQ ID NO: 42479 - protein, 8 aa, Artificial Sequence
  Peptide Derived from Human Papillomavirus
DGGDFYLH

SEQ ID NO: 42480 - protein, 11 aa, Artificial Sequence
  Peptide Derived from Human Papillomavirus
DGGDFYLHPSY

SEQ ID NO: 42481 - protein, 10 aa, Artificial Sequence
  Peptide Derived from Human Papillomavirus
DVGAPAPIPH

SEQ ID NO: 42482 - protein, 8 aa, Artificial Sequence
  Peptide Derived from Human Papillomavirus
DVIPKIEH

SEQ ID NO: 42483 - protein, 8 aa, Artificial Sequence
  Peptide Derived from Human Papillomavirus
DVTSVSTH

SEQ ID NO: 42484 - protein, 10 aa, Artificial Sequence
  Peptide Derived from Human Papillomavirus
ESLYFSNTSH

SEQ ID NO: 42485 - protein, 10 aa, Artificial Sequence
  Peptide Derived from Human Papillomavirus
ETVNAEESLY

SEQ ID NO: 42486 - protein, 8 aa, Artificial Sequence
  Peptide Derived from Human Papillomavirus
FLDIIALH

SEQ ID NO: 42487 - protein, 9 aa, Artificial Sequence
  Peptide Derived from Human Papillomavirus
FLDIIALHR

SEQ ID NO: 42488 - protein, 11 aa, Artificial Sequence
  Peptide Derived from Human Papillomavirus
FLSAPKQLITY

SEQ ID NO: 42489 - protein, 10 aa, Artificial Sequence
  Peptide Derived from Human Papillomavirus
FSGPDVPIEH

SEQ ID NO: 42490 - protein, 9 aa, Artificial Sequence
  Peptide Derived from Human Papillomavirus
FTVDTPATH

SEQ ID NO: 42491 - protein, 8 aa, Artificial Sequence
  Peptide Derived from Human Papillomavirus
FVDGGDFY

SEQ ID NO: 42492 - protein, 10 aa, Artificial Sequence
  Peptide Derived from Human Papillomavirus
FVDGGDFYLH

SEQ ID NO: 42493 - protein, 8 aa, Artificial Sequence
  Peptide Derived from Human Papillomavirus
GAPAPIPH

SEQ ID NO: 42494 - protein, 8 aa, Artificial Sequence
  Peptide Derived from Human Papillomavirus
GARVHYYY

SEQ ID NO: 42495 - protein, 9 aa, Artificial Sequence
  Peptide Derived from Human Papillomavirus
GATIGARVH

SEQ ID NO: 42496 - protein, 10 aa, Artificial Sequence
  Peptide Derived from Human Papillomavirus
GATIGARVHY

SEQ ID NO: 42497 - protein, 11 aa, Artificial Sequence
  Peptide Derived from Human Papillomavirus
GATIGARVHYY

SEQ ID NO: 42498 - protein, 9 aa, Artificial Sequence
  Peptide Derived from Human Papillomavirus
GDFYLHPSY

SEQ ID NO: 42499 - protein, 10 aa, Artificial Sequence
  Peptide Derived from Human Papillomavirus
GDFYLHPSYY

SEQ ID NO: 42500 - protein, 10 aa, Artificial Sequence
  Peptide Derived from Human Papillomavirus
GGDFYLHPSY

SEQ ID NO: 42501 - protein, 11 aa, Artificial Sequence
  Peptide Derived from Human Papillomavirus
GGDFYLHPSYY

SEQ ID NO: 42502 - protein, 11 aa, Artificial Sequence
  Peptide Derived from Human Papillomavirus
GIGSGSGTGGR

SEQ ID NO: 42503 - protein, 11 aa, Artificial Sequence
  Peptide Derived from Human Papillomavirus
GLYSKATQQVK

SEQ ID NO: 42504 - protein, 9 aa, Artificial Sequence
  Peptide Derived from Human Papillomavirus
GNKQTLRTR

SEQ ID NO: 42505 - protein, 9 aa, Artificial Sequence
  Peptide Derived from Human Papillomavirus
GSGSGTGGR

SEQ ID NO: 42506 - protein, 10 aa, Artificial Sequence
  Peptide Derived from Human Papillomavirus
GSGTGGRTGY

SEQ ID NO: 42507 - protein, 10 aa, Artificial Sequence
  Peptide Derived from Human Papillomavirus
GTCPSDVIPK

SEQ ID NO: 42508 - protein, 8 aa, Artificial Sequence
  Peptide Derived from Human Papillomavirus
GTGGRTGY

SEQ ID NO: 42509 - protein, 11 aa, Artificial Sequence
  Peptide Derived from Human Papillomavirus
GVRRPARLGLY

SEQ ID NO: 42510 - protein, 10 aa, Artificial Sequence
  Peptide Derived from Human Papillomavirus
HTTIADQILR

SEQ ID NO: 42511 - protein, 11 aa, Artificial Sequence
  Peptide Derived from Human Papillomavirus
HTTIADQILRY

SEQ ID NO: 42512 - protein, 8 aa, Artificial Sequence
  Peptide Derived from Human Papillomavirus
IADQILRY

SEQ ID NO: 42513 - protein, 11 aa, Artificial Sequence
  Peptide Derived from Human Papillomavirus
IALHRPALTSR

SEQ ID NO: 42514 - protein, 10 aa, Artificial Sequence
  Peptide Derived from Human Papillomavirus
IDPTFLSAPK

SEQ ID NO: 42515 - protein, 11 aa, Artificial Sequence
  Peptide Derived from Human Papillomavirus
IFSGPDVPIEH

SEQ ID NO: 42516 - protein, 9 aa, Artificial Sequence
  Peptide Derived from Human Papillomavirus
IFVDGGDFY

SEQ ID NO: 42517 - protein, 11 aa, Artificial Sequence
  Peptide Derived from Human Papillomavirus
IFVDGGDFYLH

SEQ ID NO: 42518 - protein, 8 aa, Artificial Sequence
  Peptide Derived from Human Papillomavirus
IGARVHYY

SEQ ID NO: 42519 - protein, 9 aa, Artificial Sequence
  Peptide Derived from Human Papillomavirus
IGARVHYYY

SEQ ID NO: 42520 - protein, 10 aa, Artificial Sequence
  Peptide Derived from Human Papillomavirus
IGSGSGTGGR

SEQ ID NO: 42521 - protein, 10 aa, Artificial Sequence
  Peptide Derived from Human Papillomavirus
ILDVTSVSTH

SEQ ID NO: 42522 - protein, 11 aa, Artificial Sequence
  Peptide Derived from Human Papillomavirus
ITSSTPIPGVR

SEQ ID NO: 42523 - protein, 8 aa, Artificial Sequence
  Peptide Derived from Human Papillomavirus
ITYENPAY

SEQ ID NO: 42524 - protein, 8 aa, Artificial Sequence
  Peptide Derived from Human Papillomavirus
LDIIALHR

SEQ ID NO: 42525 - protein, 9 aa, Artificial Sequence
  Peptide Derived from Human Papillomavirus
LDVTSVSTH

SEQ ID NO: 42526 - protein, 8 aa, Artificial Sequence
  Peptide Derived from Human Papillomavirus
LGNKQTLR

SEQ ID NO: 42527 - protein, 10 aa, Artificial Sequence
  Peptide Derived from Human Papillomavirus
LGNKQTLRTR

SEQ ID NO: 42528 - protein, 9 aa, Artificial Sequence
  Peptide Derived from Human Papillomavirus
LITYENPAY

SEQ ID NO: 42529 - protein, 11 aa, Artificial Sequence
  Peptide Derived from Human Papillomavirus
LLLSSSSISTH

SEQ ID NO: 42530 - protein, 10 aa, Artificial Sequence
  Peptide Derived from Human Papillomavirus
LLSSSSISTH

SEQ ID NO: 42531 - protein, 9 aa, Artificial Sequence
  Peptide Derived from Human Papillomavirus
LNDGLYDIY

SEQ ID NO: 42532 - protein, 10 aa, Artificial Sequence
  Peptide Derived from Human Papillomavirus
LSAPKQLITY

SEQ ID NO: 42533 - protein, 9 aa, Artificial Sequence
  Peptide Derived from Human Papillomavirus
LSSSSISTH

SEQ ID NO: 42534 - protein, 11 aa, Artificial Sequence
  Peptide Derived from Human Papillomavirus
LSSSSISTHNY

SEQ ID NO: 42535 - protein, 9 aa, Artificial Sequence
  Peptide Derived from Human Papillomavirus
LTSRRNTVR

SEQ ID NO: 42536 - protein, 10 aa, Artificial Sequence
  Peptide Derived from Human Papillomavirus
LTSRRNTVRY

SEQ ID NO: 42537 - protein, 8 aa, Artificial Sequence
  Peptide Derived from Human Papillomavirus
MLKRRRKR

SEQ ID NO: 42538 - protein, 11 aa, Artificial Sequence
  Peptide Derived from Human Papillomavirus
MLKRRRKRVSY

SEQ ID NO: 42539 - protein, 8 aa, Artificial Sequence
  Peptide Derived from Human Papillomavirus
NDGLYDIY

SEQ ID NO: 42540 - protein, 11 aa, Artificial Sequence
  Peptide Derived from Human Papillomavirus
NTVRYSRLGNK

SEQ ID NO: 42541 - protein, 11 aa, Artificial Sequence
  Peptide Derived from Human Papillomavirus
PALTSRRNTVR

SEQ ID NO: 42542 - protein, 9 aa, Artificial Sequence
  Peptide Derived from Human Papillomavirus
PARLGLYSK

SEQ ID NO: 42543 - protein, 10 aa, Artificial Sequence
  Peptide Derived from Human Papillomavirus
PDFLDIIALH

SEQ ID NO: 42544 - protein, 11 aa, Artificial Sequence
  Peptide Derived from Human Papillomavirus
PDFLDIIALHR

SEQ ID NO: 42545 - protein, 8 aa, Artificial Sequence
  Peptide Derived from Human Papillomavirus
PGVRRPAR

SEQ ID NO: 42546 - protein, 10 aa, Artificial Sequence
  Peptide Derived from Human Papillomavirus
PIPGVRRPAR

SEQ ID NO: 42547 - protein, 10 aa, Artificial Sequence
  Peptide Derived from Human Papillomavirus
PSDVIPKIEH

SEQ ID NO: 42548 - protein, 8 aa, Artificial Sequence
  Peptide Derived from Human Papillomavirus
PSYYMLKR

SEQ ID NO: 42549 - protein, 9 aa, Artificial Sequence
  Peptide Derived from Human Papillomavirus
PSYYMLKRR

SEQ ID NO: 42550 - protein, 10 aa, Artificial Sequence
  Peptide Derived from Human Papillomavirus
PSYYMLKRRR

SEQ ID NO: 42551 - protein, 11 aa, Artificial Sequence
  Peptide Derived from Human Papillomavirus
PSYYMLKRRRK

SEQ ID NO: 42552 - protein, 8 aa, Artificial Sequence
  Peptide Derived from Human Papillomavirus
PTFLSAPK

SEQ ID NO: 42553 - protein, 9 aa, Artificial Sequence
  Peptide Derived from Human Papillomavirus
PTPAETSGH

SEQ ID NO: 42554 - protein, 10 aa, Artificial Sequence
  Peptide Derived from Human Papillomavirus
QLITYENPAY

SEQ ID NO: 42555 - protein, 9 aa, Artificial Sequence
  Peptide Derived from Human Papillomavirus
QSTSAVSAY

SEQ ID NO: 42556 - protein, 8 aa, Artificial Sequence
  Peptide Derived from Human Papillomavirus
RASATQLY

SEQ ID NO: 42557 - protein, 9 aa, Artificial Sequence
  Peptide Derived from Human Papillomavirus
RLGNKQTLR

SEQ ID NO: 42558 - protein, 11 aa, Artificial Sequence
  Peptide Derived from Human Papillomavirus
RLGNKQTLRTR

SEQ ID NO: 42559 - protein, 8 aa, Artificial Sequence
  Peptide Derived from Human Papillomavirus
RNTVRYSR

SEQ ID NO: 42560 - protein, 9 aa, Artificial Sequence
  Peptide Derived from Human Papillomavirus
RSGATIGAR

SEQ ID NO: 42561 - protein, 11 aa, Artificial Sequence
  Peptide Derived from Human Papillomavirus
RSGATIGARVH

SEQ ID NO: 42562 - protein, 8 aa, Artificial Sequence
  Peptide Derived from Human Papillomavirus
RSKRSTKR

SEQ ID NO: 42563 - protein, 10 aa, Artificial Sequence
  Peptide Derived from Human Papillomavirus
RSKRSTKRTK

SEQ ID NO: 42564 - protein, 11 aa, Artificial Sequence
  Peptide Derived from Human Papillomavirus
RSKRSTKRTKR

SEQ ID NO: 42565 - protein, 8 aa, Artificial Sequence
  Peptide Derived from Human Papillomavirus
RSTKRTKR

SEQ ID NO: 42566 - protein, 10 aa, Artificial Sequence
  Peptide Derived from Human Papillomavirus
RTGYVPLSTR

SEQ ID NO: 42567 - protein, 11 aa, Artificial Sequence
  Peptide Derived from Human Papillomavirus
RTKRASATQLY

SEQ ID NO: 42568 - protein, 11 aa, Artificial Sequence
  Peptide Derived from Human Papillomavirus
RTRSGATIGAR

SEQ ID NO: 42569 - protein, 9 aa, Artificial Sequence
  Peptide Derived from Human Papillomavirus
SAPKQLITY

SEQ ID NO: 42570 - protein, 10 aa, Artificial Sequence
  Peptide Derived from Human Papillomavirus
SATQLYQTCK

SEQ ID NO: 42571 - protein, 9 aa, Artificial Sequence
  Peptide Derived from Human Papillomavirus
SDVIPKIEH

SEQ ID NO: 42572 - protein, 8 aa, Artificial Sequence
  Peptide Derived from Human Papillomavirus
SGATIGAR

SEQ ID NO: 42573 - protein, 10 aa, Artificial Sequence
  Peptide Derived from Human Papillomavirus
SGATIGARVH

SEQ ID NO: 42574 - protein, 11 aa, Artificial Sequence
  Peptide Derived from Human Papillomavirus
SGATIGARVHY

SEQ ID NO: 42575 - protein, 9 aa, Artificial Sequence
  Peptide Derived from Human Papillomavirus
SGPDVPIEH

SEQ ID NO: 42576 - protein, 8 aa, Artificial Sequence
  Peptide Derived from Human Papillomavirus
SGSGTGGR

SEQ ID NO: 42577 - protein, 11 aa, Artificial Sequence
  Peptide Derived from Human Papillomavirus
SGSGTGGRTGY

SEQ ID NO: 42578 - protein, 9 aa, Artificial Sequence
  Peptide Derived from Human Papillomavirus
SGTGGRTGY

SEQ ID NO: 42579 - protein, 10 aa, Artificial Sequence
  Peptide Derived from Human Papillomavirus
SIFVDGGDFY

SEQ ID NO: 42580 - protein, 9 aa, Artificial Sequence
  Peptide Derived from Human Papillomavirus
SLYFSNTSH

SEQ ID NO: 42581 - protein, 8 aa, Artificial Sequence
  Peptide Derived from Human Papillomavirus
SSISTHNY

SEQ ID NO: 42582 - protein, 9 aa, Artificial Sequence
  Peptide Derived from Human Papillomavirus
SSSISTHNY

SEQ ID NO: 42583 - protein, 8 aa, Artificial Sequence
  Peptide Derived from Human Papillomavirus
SSSSISTH

SEQ ID NO: 42584 - protein, 10 aa, Artificial Sequence
  Peptide Derived from Human Papillomavirus
SSSSISTHNY

SEQ ID NO: 42585 - protein, 9 aa, Artificial Sequence
  Peptide Derived from Human Papillomavirus
SSTPIPGVR

SEQ ID NO: 42586 - protein, 10 aa, Artificial Sequence
  Peptide Derived from Human Papillomavirus
SSTPIPGVRR

SEQ ID NO: 42587 - protein, 8 aa, Artificial Sequence
  Peptide Derived from Human Papillomavirus
STLNDGLY

SEQ ID NO: 42588 - protein, 11 aa, Artificial Sequence
  Peptide Derived from Human Papillomavirus
STLNDGLYDIY

SEQ ID NO: 42589 - protein, 8 aa, Artificial Sequence
  Peptide Derived from Human Papillomavirus
STPIPGVR

SEQ ID NO: 42590 - protein, 9 aa, Artificial Sequence
  Peptide Derived from Human Papillomavirus
STPIPGVRR

SEQ ID NO: 42591 - protein, 8 aa, Artificial Sequence
  Peptide Derived from Human Papillomavirus
STSAVSAY

SEQ ID NO: 42592 - protein, 11 aa, Artificial Sequence
  Peptide Derived from Human Papillomavirus
STVSEASIPIR

SEQ ID NO: 42593 - protein, 9 aa, Artificial Sequence
  Peptide Derived from Human Papillomavirus
TCPSDVIPK

SEQ ID NO: 42594 - protein, 11 aa, Artificial Sequence
  Peptide Derived from Human Papillomavirus
TDFTVDTPATH

SEQ ID NO: 42595 - protein, 9 aa, Artificial Sequence
  Peptide Derived from Human Papillomavirus
TGYVPLSTR

SEQ ID NO: 42596 - protein, 8 aa, Artificial Sequence
  Peptide Derived from Human Papillomavirus
TIADQILR

SEQ ID NO: 42597 - protein, 9 aa, Artificial Sequence
  Peptide Derived from Human Papillomavirus
TIADQILRY

SEQ ID NO: 42598 - protein, 8 aa, Artificial Sequence
  Peptide Derived from Human Papillomavirus
TIGARVHY

SEQ ID NO: 42599 - protein, 9 aa, Artificial Sequence
  Peptide Derived from Human Papillomavirus
TIGARVHYY

SEQ ID NO: 42600 - protein, 10 aa, Artificial Sequence
  Peptide Derived from Human Papillomavirus
TIGARVHYYY

SEQ ID NO: 42601 - protein, 10 aa, Artificial Sequence
  Peptide Derived from Human Papillomavirus
TLNDGLYDIY

SEQ ID NO: 42602 - protein, 8 aa, Artificial Sequence
  Peptide Derived from Human Papillomavirus
TSRRNTVR

SEQ ID NO: 42603 - protein, 9 aa, Artificial Sequence
  Peptide Derived from Human Papillomavirus
TSRRNTVRY

SEQ ID NO: 42604 - protein, 11 aa, Artificial Sequence
  Peptide Derived from Human Papillomavirus
TSRRNTVRYSR

SEQ ID NO: 42605 - protein, 10 aa, Artificial Sequence
  Peptide Derived from Human Papillomavirus
TSSTPIPGVR

SEQ ID NO: 42606 - protein, 11 aa, Artificial Sequence
  Peptide Derived from Human Papillomavirus
TSSTPIPGVRR

SEQ ID NO: 42607 - protein, 9 aa, Artificial Sequence
  Peptide Derived from Human Papillomavirus
TSTLNDGLY

SEQ ID NO: 42608 - protein, 9 aa, Artificial Sequence
  Peptide Derived from Human Papillomavirus
TTIADQILR

SEQ ID NO: 42609 - protein, 10 aa, Artificial Sequence
  Peptide Derived from Human Papillomavirus
TTIADQILRY

SEQ ID NO: 42610 - protein, 10 aa, Artificial Sequence
  Peptide Derived from Human Papillomavirus
TTSTLNDGLY

SEQ ID NO: 42611 - protein, 11 aa, Artificial Sequence
  Peptide Derived from Human Papillomavirus
TTTSTLNDGLY

SEQ ID NO: 42612 - protein, 8 aa, Artificial Sequence
  Peptide Derived from Human Papillomavirus
TVDTPATH

SEQ ID NO: 42613 - protein, 9 aa, Artificial Sequence
  Peptide Derived from Human Papillomavirus
TVNAEESLY

SEQ ID NO: 42614 - protein, 10 aa, Artificial Sequence
  Peptide Derived from Human Papillomavirus
TVRYSRLGNK

SEQ ID NO: 42615 - protein, 10 aa, Artificial Sequence
  Peptide Derived from Human Papillomavirus
TVSEASIPIR

SEQ ID NO: 42616 - protein, 9 aa, Artificial Sequence
  Peptide Derived from Human Papillomavirus
VDGGDFYLH

SEQ ID NO: 42617 - protein, 11 aa, Artificial Sequence
  Peptide Derived from Human Papillomavirus
VDVGAPAPIPH

SEQ ID NO: 42618 - protein, 9 aa, Artificial Sequence
  Peptide Derived from Human Papillomavirus
VGAPAPIPH

SEQ ID NO: 42619 - protein, 11 aa, Artificial Sequence
  Peptide Derived from Human Papillomavirus
VIDPTFLSAPK

SEQ ID NO: 42620 - protein, 8 aa, Artificial Sequence
  Peptide Derived from Human Papillomavirus
VNAEESLY

SEQ ID NO: 42621 - protein, 9 aa, Artificial Sequence
  Peptide Derived from Human Papillomavirus
VSEASIPIR

SEQ ID NO: 42622 - protein, 11 aa, Artificial Sequence
  Peptide Derived from Human Papillomavirus
VSIFVDGGDFY

SEQ ID NO: 42623 - protein, 10 aa, Artificial Sequence
  Peptide Derived from Human Papillomavirus
YLHPSYYMLK

SEQ ID NO: 42624 - protein, 11 aa, Artificial Sequence
  Peptide Derived from Human Papillomavirus
YLHPSYYMLKR

SEQ ID NO: 42625 - protein, 8 aa, Artificial Sequence
  Peptide Derived from Human Papillomavirus
YMLKRRRK

SEQ ID NO: 42626 - protein, 9 aa, Artificial Sequence
  Peptide Derived from Human Papillomavirus
YMLKRRRKR

SEQ ID NO: 42627 - protein, 9 aa, Artificial Sequence
  Peptide Derived from Human Papillomavirus
YSKATQQVK

SEQ ID NO: 42628 - protein, 11 aa, Artificial Sequence
  Peptide Derived from Human Papillomavirus
YSRLGNKQTLR

SEQ ID NO: 42629 - protein, 8 aa, Artificial Sequence
  Peptide Derived from Human Papillomavirus
AAEDVVDR

SEQ ID NO: 42630 - protein, 11 aa, Artificial Sequence
  Peptide Derived from Human Papillomavirus
AAFLKSNSQAK

SEQ ID NO: 42631 - protein, 11 aa, Artificial Sequence
  Peptide Derived from Human Papillomavirus
AANPCRTSINK

SEQ ID NO: 42632 - protein, 11 aa, Artificial Sequence
  Peptide Derived from Human Papillomavirus
AFKKFLKGIPK

SEQ ID NO: 42633 - protein, 8 aa, Artificial Sequence
  Peptide Derived from Human Papillomavirus
AFLGAFKK

SEQ ID NO: 42634 - protein, 11 aa, Artificial Sequence
  Peptide Derived from Human Papillomavirus
AFLGAFKKFLK

SEQ ID NO: 42635 - protein, 10 aa, Artificial Sequence
  Peptide Derived from Human Papillomavirus
AFLKSNSQAK

SEQ ID NO: 42636 - protein, 9 aa, Artificial Sequence
  Peptide Derived from Human Papillomavirus
AGENTRSLR

SEQ ID NO: 42637 - protein, 9 aa, Artificial Sequence
  Peptide Derived from Human Papillomavirus
AGTDSRWPY

SEQ ID NO: 42638 - protein, 11 aa, Artificial Sequence
  Peptide Derived from Human Papillomavirus
AGTDSRWPYLH

SEQ ID NO: 42639 - protein, 8 aa, Artificial Sequence
  Peptide Derived from Human Papillomavirus
AINDENWK

SEQ ID NO: 42640 - protein, 8 aa, Artificial Sequence
  Peptide Derived from Human Papillomavirus
ANILYKFK

SEQ ID NO: 42641 - protein, 11 aa, Artificial Sequence
  Peptide Derived from Human Papillomavirus
ANILYKFKEAY

SEQ ID NO: 42642 - protein, 10 aa, Artificial Sequence
  Peptide Derived from Human Papillomavirus
ANPCRTSINK

SEQ ID NO: 42643 - protein, 8 aa, Artificial Sequence
  Peptide Derived from Human Papillomavirus
AVCALKRK

SEQ ID NO: 42644 - protein, 8 aa, Artificial Sequence
  Peptide Derived from Human Papillomavirus
CGIMCRHY

SEQ ID NO: 42645 - protein, 9 aa, Artificial Sequence
  Peptide Derived from Human Papillomavirus
CGIMCRHYK

SEQ ID NO: 42646 - protein, 10 aa, Artificial Sequence
  Peptide Derived from Human Papillomavirus
CGIMCRHYKK

SEQ ID NO: 42647 - protein, 8 aa, Artificial Sequence
  Peptide Derived from Human Papillomavirus
CGPANTGK

SEQ ID NO: 42648 - protein, 10 aa, Artificial Sequence
  Peptide Derived from Human Papillomavirus
CGPANTGKSY

SEQ ID NO: 42649 - protein, 8 aa, Artificial Sequence
  Peptide Derived from Human Papillomavirus
CMVIEPPK

SEQ ID NO: 42650 - protein, 10 aa, Artificial Sequence
  Peptide Derived from Human Papillomavirus
CMVIEPPKLR

SEQ ID NO: 42651 - protein, 8 aa, Artificial Sequence
  Peptide Derived from Human Papillomavirus
CSAGENTR

SEQ ID NO: 42652 - protein, 11 aa, Artificial Sequence
  Peptide Derived from Human Papillomavirus
CSAGENTRSLR

SEQ ID NO: 42653 - protein, 10 aa, Artificial Sequence
  Peptide Derived from Human Papillomavirus
CSKNRLTVAK

SEQ ID NO: 42654 - protein, 9 aa, Artificial Sequence
  Peptide Derived from Human Papillomavirus
CTDWCITGY

SEQ ID NO: 42655 - protein, 9 aa, Artificial Sequence
  Peptide Derived from Human Papillomavirus
CVISCVNSK

SEQ ID NO: 42656 - protein, 11 aa, Artificial Sequence
  Peptide Derived from Human Papillomavirus
CVISCVNSKSH

SEQ ID NO: 42657 - protein, 8 aa, Artificial Sequence
  Peptide Derived from Human Papillomavirus
DCGIMCRH

SEQ ID NO: 42658 - protein, 9 aa, Artificial Sequence
  Peptide Derived from Human Papillomavirus
DCGIMCRHY

SEQ ID NO: 42659 - protein, 10 aa, Artificial Sequence
  Peptide Derived from Human Papillomavirus
DCGIMCRHYK

SEQ ID NO: 42660 - protein, 11 aa, Artificial Sequence
  Peptide Derived from Human Papillomavirus
DCGIMCRHYKK

SEQ ID NO: 42661 - protein, 10 aa, Artificial Sequence
  Peptide Derived from Human Papillomavirus
DDLNAVCALK

SEQ ID NO: 42662 - protein, 11 aa, Artificial Sequence
  Peptide Derived from Human Papillomavirus
DDLNAVCALKR

SEQ ID NO: 42663 - protein, 8 aa, Artificial Sequence
  Peptide Derived from Human Papillomavirus
DDSDIAYY

SEQ ID NO: 42664 - protein, 9 aa, Artificial Sequence
  Peptide Derived from Human Papillomavirus
DDSDIAYYY

SEQ ID NO: 42665 - protein, 10 aa, Artificial Sequence
  Peptide Derived from Human Papillomavirus
DDVTPISWTY

SEQ ID NO: 42666 - protein, 10 aa, Artificial Sequence
  Peptide Derived from Human Papillomavirus
DGNEISIDVK

SEQ ID NO: 42667 - protein, 11 aa, Artificial Sequence
  Peptide Derived from Human Papillomavirus
DGNEISIDVKH

SEQ ID NO: 42668 - protein, 8 aa, Artificial Sequence
  Peptide Derived from Human Papillomavirus
DLIEEEDK

SEQ ID NO: 42669 - protein, 11 aa, Artificial Sequence
  Peptide Derived from Human Papillomavirus
DLIEEEDKENH

SEQ ID NO: 42670 - protein, 9 aa, Artificial Sequence
  Peptide Derived from Human Papillomavirus
DLNAVCALK

SEQ ID NO: 42671 - protein, 10 aa, Artificial Sequence
  Peptide Derived from Human Papillomavirus
DLNAVCALKR

SEQ ID NO: 42672 - protein, 11 aa, Artificial Sequence
  Peptide Derived from Human Papillomavirus
DLNAVCALKRK

SEQ ID NO: 42673 - protein, 10 aa, Artificial Sequence
  Peptide Derived from Human Papillomavirus
DLSEMVQWAY

SEQ ID NO: 42674 - protein, 8 aa, Artificial Sequence
  Peptide Derived from Human Papillomavirus
DSDIAYYY

SEQ ID NO: 42675 - protein, 11 aa, Artificial Sequence
  Peptide Derived from Human Papillomavirus
DSNSNAAAFLK

SEQ ID NO: 42676 - protein, 8 aa, Artificial Sequence
  Peptide Derived from Human Papillomavirus
DSRWPYLH

SEQ ID NO: 42677 - protein, 10 aa, Artificial Sequence
  Peptide Derived from Human Papillomavirus
DSRWPYLHSR

SEQ ID NO: 42678 - protein, 11 aa, Artificial Sequence
  Peptide Derived from Human Papillomavirus
DVKHRALVQLK

SEQ ID NO: 42679 - protein, 9 aa, Artificial Sequence
  Peptide Derived from Human Papillomavirus
DVTPISWTY

SEQ ID NO: 42680 - protein, 11 aa, Artificial Sequence
  Peptide Derived from Human Papillomavirus
DVVDRAANPCR

SEQ ID NO: 42681 - protein, 8 aa, Artificial Sequence
  Peptide Derived from Human Papillomavirus
ECTYRKRK

SEQ ID NO: 42682 - protein, 11 aa, Artificial Sequence
  Peptide Derived from Human Papillomavirus
EDDLNAVCALK

SEQ ID NO: 42683 - protein, 10 aa, Artificial Sequence
  Peptide Derived from Human Papillomavirus
EFTAFLGAFK

SEQ ID NO: 42684 - protein, 11 aa, Artificial Sequence
  Peptide Derived from Human Papillomavirus
EFTAFLGAFKK

SEQ ID NO: 42685 - protein, 8 aa, Artificial Sequence
  Peptide Derived from Human Papillomavirus
EISIDVKH

SEQ ID NO: 42686 - protein, 9 aa, Artificial Sequence
  Peptide Derived from Human Papillomavirus
EISIDVKHR

SEQ ID NO: 42687 - protein, 10 aa, Artificial Sequence
  Peptide Derived from Human Papillomavirus
ELTDDSDIAY

SEQ ID NO: 42688 - protein, 11 aa, Artificial Sequence
  Peptide Derived from Human Papillomavirus
ELTDDSDIAYY

SEQ ID NO: 42689 - protein, 10 aa, Artificial Sequence
  Peptide Derived from Human Papillomavirus
ELVRPFKSDK

SEQ ID NO: 42690 - protein, 11 aa, Artificial Sequence
  Peptide Derived from Human Papillomavirus
ENHGGNISTFK

SEQ ID NO: 42691 - protein, 9 aa, Artificial Sequence
  Peptide Derived from Human Papillomavirus
ENWKSFFSR

SEQ ID NO: 42692 - protein, 8 aa, Artificial Sequence
  Peptide Derived from Human Papillomavirus
ESLKVLIK

SEQ ID NO: 42693 - protein, 10 aa, Artificial Sequence
  Peptide Derived from Human Papillomavirus
ESLKVLIKQH

SEQ ID NO: 42694 - protein, 10 aa, Artificial Sequence
  Peptide Derived from Human Papillomavirus
ETCMVIEPPK

SEQ ID NO: 42695 - protein, 8 aa, Artificial Sequence
  Peptide Derived from Human Papillomavirus
EVEAVIER

SEQ ID NO: 42696 - protein, 9 aa, Artificial Sequence
  Peptide Derived from Human Papillomavirus
EVEAVIERR

SEQ ID NO: 42697 - protein, 9 aa, Artificial Sequence
  Peptide Derived from Human Papillomavirus
FDENGNPVY

SEQ ID NO: 42698 - protein, 11 aa, Artificial Sequence
  Peptide Derived from Human Papillomavirus
FDLSEMVQWAY

SEQ ID NO: 42699 - protein, 8 aa, Artificial Sequence
  Peptide Derived from Human Papillomavirus
FFSRTWCK

SEQ ID NO: 42700 - protein, 10 aa, Artificial Sequence
  Peptide Derived from Human Papillomavirus
FGMSLIQFLK

SEQ ID NO: 42701 - protein, 10 aa, Artificial Sequence
  Peptide Derived from Human Papillomavirus
FLGAFKKFLK

SEQ ID NO: 42702 - protein, 8 aa, Artificial Sequence
  Peptide Derived from Human Papillomavirus
FLKGIPKK

SEQ ID NO: 42703 - protein, 9 aa, Artificial Sequence
  Peptide Derived from Human Papillomavirus
FLKSNSQAK

SEQ ID NO: 42704 - protein, 9 aa, Artificial Sequence
  Peptide Derived from Human Papillomavirus
FMELVRPFK

SEQ ID NO: 42705 - protein, 9 aa, Artificial Sequence
  Peptide Derived from Human Papillomavirus
FTAFLGAFK

SEQ ID NO: 42706 - protein, 10 aa, Artificial Sequence
  Peptide Derived from Human Papillomavirus
FTAFLGAFKK

SEQ ID NO: 42707 - protein, 8 aa, Artificial Sequence
  Peptide Derived from Human Papillomavirus
GAFKKFLK

SEQ ID NO: 42708 - protein, 10 aa, Artificial Sequence
  Peptide Derived from Human Papillomavirus
GCVISCVNSK

SEQ ID NO: 42709 - protein, 8 aa, Artificial Sequence
  Peptide Derived from Human Papillomavirus
GGNISTFK

SEQ ID NO: 42710 - protein, 9 aa, Artificial Sequence
  Peptide Derived from Human Papillomavirus
GIIILLLIR

SEQ ID NO: 42711 - protein, 11 aa, Artificial Sequence
  Peptide Derived from Human Papillomavirus
GIIILLLIRFR

SEQ ID NO: 42712 - protein, 8 aa, Artificial Sequence
  Peptide Derived from Human Papillomavirus
GIMCRHYK

SEQ ID NO: 42713 - protein, 9 aa, Artificial Sequence
  Peptide Derived from Human Papillomavirus
GIMCRHYKK

SEQ ID NO: 42714 - protein, 9 aa, Artificial Sequence
  Peptide Derived from Human Papillomavirus
GISFMELVR

SEQ ID NO: 42715 - protein, 11 aa, Artificial Sequence
  Peptide Derived from Human Papillomavirus
GISPSVAESLK

SEQ ID NO: 42716 - protein, 9 aa, Artificial Sequence
  Peptide Derived from Human Papillomavirus
GMSLIQFLK

SEQ ID NO: 42717 - protein, 9 aa, Artificial Sequence
  Peptide Derived from Human Papillomavirus
GNEISIDVK

SEQ ID NO: 42718 - protein, 10 aa, Artificial Sequence
  Peptide Derived from Human Papillomavirus
GNEISIDVKH

SEQ ID NO: 42719 - protein, 11 aa, Artificial Sequence
  Peptide Derived from Human Papillomavirus
GNEISIDVKHR

SEQ ID NO: 42720 - protein, 11 aa, Artificial Sequence
  Peptide Derived from Human Papillomavirus
GNWRPIVQLLR

SEQ ID NO: 42721 - protein, 8 aa, Artificial Sequence
  Peptide Derived from Human Papillomavirus
GTDSRWPY

SEQ ID NO: 42722 - protein, 10 aa, Artificial Sequence
  Peptide Derived from Human Papillomavirus
GTDSRWPYLH

SEQ ID NO: 42723 - protein, 9 aa, Artificial Sequence
  Peptide Derived from Human Papillomavirus
GTTPEWIDR

SEQ ID NO: 42724 - protein, 11 aa, Artificial Sequence
  Peptide Derived from Human Papillomavirus
HFWLQPLSDAK

SEQ ID NO: 42725 - protein, 9 aa, Artificial Sequence
  Peptide Derived from Human Papillomavirus
HGGNISTFK

SEQ ID NO: 42726 - protein, 9 aa, Artificial Sequence
  Peptide Derived from Human Papillomavirus
HLQCLTCDR

SEQ ID NO: 42727 - protein, 10 aa, Artificial Sequence
  Peptide Derived from Human Papillomavirus
HSRLTVFEFK

SEQ ID NO: 42728 - protein, 11 aa, Artificial Sequence
  Peptide Derived from Human Papillomavirus
HSSNTKANILY

SEQ ID NO: 42729 - protein, 9 aa, Artificial Sequence
  Peptide Derived from Human Papillomavirus
ICGPANTGK

SEQ ID NO: 42730 - protein, 11 aa, Artificial Sequence
  Peptide Derived from Human Papillomavirus
ICGPANTGKSY

SEQ ID NO: 42731 - protein, 11 aa, Artificial Sequence
  Peptide Derived from Human Papillomavirus
IDDVTPISWTY

SEQ ID NO: 42732 - protein, 9 aa, Artificial Sequence
  Peptide Derived from Human Papillomavirus
IDELEDSGY

SEQ ID NO: 42733 - protein, 9 aa, Artificial Sequence
  Peptide Derived from Human Papillomavirus
IDRLTVLQH

SEQ ID NO: 42734 - protein, 8 aa, Artificial Sequence
  Peptide Derived from Human Papillomavirus
IGQWIQSR

SEQ ID NO: 42735 - protein, 11 aa, Artificial Sequence
  Peptide Derived from Human Papillomavirus
IGQWIQSRCEK

SEQ ID NO: 42736 - protein, 8 aa, Artificial Sequence
  Peptide Derived from Human Papillomavirus
IIILLLIR

SEQ ID NO: 42737 - protein, 10 aa, Artificial Sequence
  Peptide Derived from Human Papillomavirus
IIILLLIRFR

SEQ ID NO: 42738 - protein, 9 aa, Artificial Sequence
  Peptide Derived from Human Papillomavirus
IILLLIRFR

SEQ ID NO: 42739 - protein, 8 aa, Artificial Sequence
  Peptide Derived from Human Papillomavirus
ILLLIRFR

SEQ ID NO: 42740 - protein, 11 aa, Artificial Sequence
  Peptide Derived from Human Papillomavirus
ILLLIRFRCSK

SEQ ID NO: 42741 - protein, 9 aa, Artificial Sequence
  Peptide Derived from Human Papillomavirus
ILYKFKEAY

SEQ ID NO: 42742 - protein, 8 aa, Artificial Sequence
  Peptide Derived from Human Papillomavirus
IMCRHYKK

SEQ ID NO: 42743 - protein, 11 aa, Artificial Sequence
  Peptide Derived from Human Papillomavirus
IMCRHYKKAEK

SEQ ID NO: 42744 - protein, 9 aa, Artificial Sequence
  Peptide Derived from Human Papillomavirus
INKNKECTY

SEQ ID NO: 42745 - protein, 10 aa, Artificial Sequence
  Peptide Derived from Human Papillomavirus
INKNKECTYR

SEQ ID NO: 42746 - protein, 11 aa, Artificial Sequence
  Peptide Derived from Human Papillomavirus
INKNKECTYRK

SEQ ID NO: 42747 - protein, 9 aa, Artificial Sequence
  Peptide Derived from Human Papillomavirus
ISCVNSKSH

SEQ ID NO: 42748 - protein, 8 aa, Artificial Sequence
  Peptide Derived from Human Papillomavirus
ISFMELVR

SEQ ID NO: 42749 - protein, 11 aa, Artificial Sequence
  Peptide Derived from Human Papillomavirus
ISFMELVRPFK

SEQ ID NO: 42750 - protein, 8 aa, Artificial Sequence
  Peptide Derived from Human Papillomavirus
ISIDVKHR

SEQ ID NO: 42751 - protein, 11 aa, Artificial Sequence
  Peptide Derived from Human Papillomavirus
ISNVLHSSNTK

SEQ ID NO: 42752 - protein, 10 aa, Artificial Sequence
  Peptide Derived from Human Papillomavirus
ISPSVAESLK

SEQ ID NO: 42753 - protein, 9 aa, Artificial Sequence
  Peptide Derived from Human Papillomavirus
ISWTYIDDY

SEQ ID NO: 42754 - protein, 11 aa, Artificial Sequence
  Peptide Derived from Human Papillomavirus
ISWTYIDDYMR

SEQ ID NO: 42755 - protein, 10 aa, Artificial Sequence
  Peptide Derived from Human Papillomavirus
IVKDCGIMCR

SEQ ID NO: 42756 - protein, 11 aa, Artificial Sequence
  Peptide Derived from Human Papillomavirus
IVKDCGIMCRH

SEQ ID NO: 42757 - protein, 9 aa, Artificial Sequence
  Peptide Derived from Human Papillomavirus
KANILYKFK

SEQ ID NO: 42758 - protein, 9 aa, Artificial Sequence
  Peptide Derived from Human Papillomavirus
KCSAGENTR

SEQ ID NO: 42759 - protein, 8 aa, Artificial Sequence
  Peptide Derived from Human Papillomavirus
KDCGIMCR

SEQ ID NO: 42760 - protein, 9 aa, Artificial Sequence
  Peptide Derived from Human Papillomavirus
KDCGIMCRH

SEQ ID NO: 42761 - protein, 10 aa, Artificial Sequence
  Peptide Derived from Human Papillomavirus
KDCGIMCRHY

SEQ ID NO: 42762 - protein, 11 aa, Artificial Sequence
  Peptide Derived from Human Papillomavirus
KDCGIMCRHYK

SEQ ID NO: 42763 - protein, 8 aa, Artificial Sequence
  Peptide Derived from Human Papillomavirus
KFLKGIPK

SEQ ID NO: 42764 - protein, 9 aa, Artificial Sequence
  Peptide Derived from Human Papillomavirus
KFLKGIPKK

SEQ ID NO: 42765 - protein, 11 aa, Artificial Sequence
  Peptide Derived from Human Papillomavirus
KGCVISCVNSK

SEQ ID NO: 42766 - protein, 10 aa, Artificial Sequence
  Peptide Derived from Human Papillomavirus
KIDELEDSGY

SEQ ID NO: 42767 - protein, 11 aa, Artificial Sequence
  Peptide Derived from Human Papillomavirus
KIVKDCGIMCR

SEQ ID NO: 42768 - protein, 10 aa, Artificial Sequence
  Peptide Derived from Human Papillomavirus
KLDLIEEEDK

SEQ ID NO: 42769 - protein, 10 aa, Artificial Sequence
  Peptide Derived from Human Papillomavirus
KLRSQTCALY

SEQ ID NO: 42770 - protein, 11 aa, Artificial Sequence
  Peptide Derived from Human Papillomavirus
KMSIGQWIQSR

SEQ ID NO: 42771 - protein, 8 aa, Artificial Sequence
  Peptide Derived from Human Papillomavirus
KNKECTYR

SEQ ID NO: 42772 - protein, 9 aa, Artificial Sequence
  Peptide Derived from Human Papillomavirus
KNKECTYRK

SEQ ID NO: 42773 - protein, 10 aa, Artificial Sequence
  Peptide Derived from Human Papillomavirus
KNKECTYRKR

SEQ ID NO: 42774 - protein, 11 aa, Artificial Sequence
  Peptide Derived from Human Papillomavirus
KNKECTYRKRK

SEQ ID NO: 42775 - protein, 8 aa, Artificial Sequence
  Peptide Derived from Human Papillomavirus
KNRLTVAK

SEQ ID NO: 42776 - protein, 10 aa, Artificial Sequence
  Peptide Derived from Human Papillomavirus
KSFFSRTWCK

SEQ ID NO: 42777 - protein, 10 aa, Artificial Sequence
  Peptide Derived from Human Papillomavirus
KSNSQAKIVK

SEQ ID NO: 42778 - protein, 9 aa, Artificial Sequence
  Peptide Derived from Human Papillomavirus
KTNDGGNWR

SEQ ID NO: 42779 - protein, 10 aa, Artificial Sequence
  Peptide Derived from Human Papillomavirus
KVLIKQHSLY

SEQ ID NO: 42780 - protein, 11 aa, Artificial Sequence
  Peptide Derived from Human Papillomavirus
LDGNEISIDVK

SEQ ID NO: 42781 - protein, 9 aa, Artificial Sequence
  Peptide Derived from Human Papillomavirus
LDLIEEEDK

SEQ ID NO: 42782 - protein, 9 aa, Artificial Sequence
  Peptide Derived from Human Papillomavirus
LGAFKKFLK

SEQ ID NO: 42783 - protein, 10 aa, Artificial Sequence
  Peptide Derived from Human Papillomavirus
LICGPANTGK

SEQ ID NO: 42784 - protein, 10 aa, Artificial Sequence
  Peptide Derived from Human Papillomavirus
LIEEEDKENH

SEQ ID NO: 42785 - protein, 8 aa, Artificial Sequence
  Peptide Derived from Human Papillomavirus
LIKQHSLY

SEQ ID NO: 42786 - protein, 10 aa, Artificial Sequence
  Peptide Derived from Human Papillomavirus
LIKQHSLYTH

SEQ ID NO: 42787 - protein, 8 aa, Artificial Sequence
  Peptide Derived from Human Papillomavirus
LIRFRCSK

SEQ ID NO: 42788 - protein, 10 aa, Artificial Sequence
  Peptide Derived from Human Papillomavirus
LIRFRCSKNR

SEQ ID NO: 42789 - protein, 9 aa, Artificial Sequence
  Peptide Derived from Human Papillomavirus
LLIRFRCSK

SEQ ID NO: 42790 - protein, 11 aa, Artificial Sequence
  Peptide Derived from Human Papillomavirus
LLIRFRCSKNR

SEQ ID NO: 42791 - protein, 10 aa, Artificial Sequence
  Peptide Derived from Human Papillomavirus
LLLIRFRCSK

SEQ ID NO: 42792 - protein, 8 aa, Artificial Sequence
  Peptide Derived from Human Papillomavirus
LNAVCALK

SEQ ID NO: 42793 - protein, 9 aa, Artificial Sequence
  Peptide Derived from Human Papillomavirus
LNAVCALKR

SEQ ID NO: 42794 - protein, 10 aa, Artificial Sequence
  Peptide Derived from Human Papillomavirus
LNAVCALKRK

SEQ ID NO: 42795 - protein, 9 aa, Artificial Sequence
  Peptide Derived from Human Papillomavirus
LSEMVQWAY

SEQ ID NO: 42796 - protein, 9 aa, Artificial Sequence
  Peptide Derived from Human Papillomavirus
LTDDSDIAY

SEQ ID NO: 42797 - protein, 10 aa, Artificial Sequence
  Peptide Derived from Human Papillomavirus
LTDDSDIAYY

SEQ ID NO: 42798 - protein, 11 aa, Artificial Sequence
  Peptide Derived from Human Papillomavirus
LTDDSDIAYYY

SEQ ID NO: 42799 - protein, 9 aa, Artificial Sequence
  Peptide Derived from Human Papillomavirus
LVRPFKSDK

SEQ ID NO: 42800 - protein, 10 aa, Artificial Sequence
  Peptide Derived from Human Papillomavirus
MCRHYKKAEK

SEQ ID NO: 42801 - protein, 11 aa, Artificial Sequence
  Peptide Derived from Human Papillomavirus
MCRHYKKAEKR

SEQ ID NO: 42802 - protein, 11 aa, Artificial Sequence
  Peptide Derived from Human Papillomavirus
MLICGPANTGK

SEQ ID NO: 42803 - protein, 10 aa, Artificial Sequence
  Peptide Derived from Human Papillomavirus
MSIGQWIQSR

SEQ ID NO: 42804 - protein, 8 aa, Artificial Sequence
  Peptide Derived from Human Papillomavirus
MSLIQFLK

SEQ ID NO: 42805 - protein, 9 aa, Artificial Sequence
  Peptide Derived from Human Papillomavirus
MVIEPPKLR

SEQ ID NO: 42806 - protein, 10 aa, Artificial Sequence
  Peptide Derived from Human Papillomavirus
NAGTDSRWPY

SEQ ID NO: 42807 - protein, 8 aa, Artificial Sequence
  Peptide Derived from Human Papillomavirus
NAVCALKR

SEQ ID NO: 42808 - protein, 9 aa, Artificial Sequence
  Peptide Derived from Human Papillomavirus
NAVCALKRK

SEQ ID NO: 42809 - protein, 11 aa, Artificial Sequence
  Peptide Derived from Human Papillomavirus
NDENWKSFFSR

SEQ ID NO: 42810 - protein, 10 aa, Artificial Sequence
  Peptide Derived from Human Papillomavirus
NILYKFKEAY

SEQ ID NO: 42811 - protein, 11 aa, Artificial Sequence
  Peptide Derived from Human Papillomavirus
NSIQADTEAAR

SEQ ID NO: 42812 - protein, 9 aa, Artificial Sequence
  Peptide Derived from Human Papillomavirus
NSNAAAFLK

SEQ ID NO: 42813 - protein, 8 aa, Artificial Sequence
  Peptide Derived from Human Papillomavirus
NSQAKIVK

SEQ ID NO: 42814 - protein, 8 aa, Artificial Sequence
  Peptide Derived from Human Papillomavirus
NTKANILY

SEQ ID NO: 42815 - protein, 9 aa, Artificial Sequence
  Peptide Derived from Human Papillomavirus
NTKANILYK

SEQ ID NO: 42816 - protein, 11 aa, Artificial Sequence
  Peptide Derived from Human Papillomavirus
NTKANILYKFK

SEQ ID NO: 42817 - protein, 9 aa, Artificial Sequence
  Peptide Derived from Human Papillomavirus
NTNAGTDSR

SEQ ID NO: 42818 - protein, 9 aa, Artificial Sequence
  Peptide Derived from Human Papillomavirus
NVLHSSNTK

SEQ ID NO: 42819 - protein, 8 aa, Artificial Sequence
  Peptide Derived from Human Papillomavirus
PANTGKSY

SEQ ID NO: 42820 - protein, 8 aa, Artificial Sequence
  Peptide Derived from Human Papillomavirus
PCRTSINK

SEQ ID NO: 42821 - protein, 10 aa, Artificial Sequence
  Peptide Derived from Human Papillomavirus
PCRTSINKNK

SEQ ID NO: 42822 - protein, 10 aa, Artificial Sequence
  Peptide Derived from Human Papillomavirus
PFDENGNPVY

SEQ ID NO: 42823 - protein, 10 aa, Artificial Sequence
  Peptide Derived from Human Papillomavirus
PISWTYIDDY

SEQ ID NO: 42824 - protein, 8 aa, Artificial Sequence
  Peptide Derived from Human Papillomavirus
PIVQLLRY

SEQ ID NO: 42825 - protein, 8 aa, Artificial Sequence
  Peptide Derived from Human Papillomavirus
PSVAESLK

SEQ ID NO: 42826 - protein, 11 aa, Artificial Sequence
  Peptide Derived from Human Papillomavirus
PVYAINDENWK

SEQ ID NO: 42827 - protein, 8 aa, Artificial Sequence
  Peptide Derived from Human Papillomavirus
QADTEAAR

SEQ ID NO: 42828 - protein, 10 aa, Artificial Sequence
  Peptide Derived from Human Papillomavirus
QGTTPEWIDR

SEQ ID NO: 42829 - protein, 10 aa, Artificial Sequence
  Peptide Derived from Human Papillomavirus
QSAAEDVVDR

SEQ ID NO: 42830 - protein, 9 aa, Artificial Sequence
  Peptide Derived from Human Papillomavirus
QTCALYWFR

SEQ ID NO: 42831 - protein, 11 aa, Artificial Sequence
  Peptide Derived from Human Papillomavirus
RCSKNRLTVAK

SEQ ID NO: 42832 - protein, 8 aa, Artificial Sequence
  Peptide Derived from Human Papillomavirus
RFRCSKNR

SEQ ID NO: 42833 - protein, 10 aa, Artificial Sequence
  Peptide Derived from Human Papillomavirus
RGIIILLLIR

SEQ ID NO: 42834 - protein, 8 aa, Artificial Sequence
  Peptide Derived from Human Papillomavirus
RLTVFEFK

SEQ ID NO: 42835 - protein, 8 aa, Artificial Sequence
  Peptide Derived from Human Papillomavirus
RSQTCALY

SEQ ID NO: 42836 - protein, 11 aa, Artificial Sequence
  Peptide Derived from Human Papillomavirus
RSQTCALYWFR

SEQ ID NO: 42837 - protein, 8 aa, Artificial Sequence
  Peptide Derived from Human Papillomavirus
RTSINKNK

SEQ ID NO: 42838 - protein, 9 aa, Artificial Sequence
  Peptide Derived from Human Papillomavirus
SAAEDVVDR

SEQ ID NO: 42839 - protein, 10 aa, Artificial Sequence
  Peptide Derived from Human Papillomavirus
SAGENTRSLR

SEQ ID NO: 42840 - protein, 10 aa, Artificial Sequence
  Peptide Derived from Human Papillomavirus
SCTDWCITGY

SEQ ID NO: 42841 - protein, 8 aa, Artificial Sequence
  Peptide Derived from Human Papillomavirus
SCVNSKSH

SEQ ID NO: 42842 - protein, 9 aa, Artificial Sequence
  Peptide Derived from Human Papillomavirus
SFFSRTWCK

SEQ ID NO: 42843 - protein, 10 aa, Artificial Sequence
  Peptide Derived from Human Papillomavirus
SFMELVRPFK

SEQ ID NO: 42844 - protein, 9 aa, Artificial Sequence
  Peptide Derived from Human Papillomavirus
SIGQWIQSR

SEQ ID NO: 42845 - protein, 10 aa, Artificial Sequence
  Peptide Derived from Human Papillomavirus
SINKNKECTY

SEQ ID NO: 42846 - protein, 11 aa, Artificial Sequence
  Peptide Derived from Human Papillomavirus
SINKNKECTYR

SEQ ID NO: 42847 - protein, 10 aa, Artificial Sequence
  Peptide Derived from Human Papillomavirus
SIQADTEAAR

SEQ ID NO: 42848 - protein, 9 aa, Artificial Sequence
  Peptide Derived from Human Papillomavirus
SLKVLIKQH

SEQ ID NO: 42849 - protein, 8 aa, Artificial Sequence
  Peptide Derived from Human Papillomavirus
SNAAAFLK

SEQ ID NO: 42850 - protein, 10 aa, Artificial Sequence
  Peptide Derived from Human Papillomavirus
SNSNAAAFLK

SEQ ID NO: 42851 - protein, 9 aa, Artificial Sequence
  Peptide Derived from Human Papillomavirus
SNSQAKIVK

SEQ ID NO: 42852 - protein, 9 aa, Artificial Sequence
  Peptide Derived from Human Papillomavirus
SNTKANILY

SEQ ID NO: 42853 - protein, 10 aa, Artificial Sequence
  Peptide Derived from Human Papillomavirus
SNTKANILYK

SEQ ID NO: 42854 - protein, 10 aa, Artificial Sequence
  Peptide Derived from Human Papillomavirus
SNTNAGTDSR

SEQ ID NO: 42855 - protein, 10 aa, Artificial Sequence
  Peptide Derived from Human Papillomavirus
SNVLHSSNTK

SEQ ID NO: 42856 - protein, 10 aa, Artificial Sequence
  Peptide Derived from Human Papillomavirus
SSNTKANILY

SEQ ID NO: 42857 - protein, 11 aa, Artificial Sequence
  Peptide Derived from Human Papillomavirus
SSNTKANILYK

SEQ ID NO: 42858 - protein, 11 aa, Artificial Sequence
  Peptide Derived from Human Papillomavirus
SVAESLKVLIK

SEQ ID NO: 42859 - protein, 8 aa, Artificial Sequence
  Peptide Derived from Human Papillomavirus
TAFLGAFK

SEQ ID NO: 42860 - protein, 9 aa, Artificial Sequence
  Peptide Derived from Human Papillomavirus
TAFLGAFKK

SEQ ID NO: 42861 - protein, 8 aa, Artificial Sequence
  Peptide Derived from Human Papillomavirus
TCALYWFR

SEQ ID NO: 42862 - protein, 9 aa, Artificial Sequence
  Peptide Derived from Human Papillomavirus
TCMVIEPPK

SEQ ID NO: 42863 - protein, 11 aa, Artificial Sequence
  Peptide Derived from Human Papillomavirus
TCMVIEPPKLR

SEQ ID NO: 42864 - protein, 8 aa, Artificial Sequence
  Peptide Derived from Human Papillomavirus
TDDSDIAY

SEQ ID NO: 42865 - protein, 9 aa, Artificial Sequence
  Peptide Derived from Human Papillomavirus
TDDSDIAYY

SEQ ID NO: 42866 - protein, 10 aa, Artificial Sequence
  Peptide Derived from Human Papillomavirus
TDDSDIAYYY

SEQ ID NO: 42867 - protein, 9 aa, Artificial Sequence
  Peptide Derived from Human Papillomavirus
TDSRWPYLH

SEQ ID NO: 42868 - protein, 11 aa, Artificial Sequence
  Peptide Derived from Human Papillomavirus
TDSRWPYLHSR

SEQ ID NO: 42869 - protein, 8 aa, Artificial Sequence
  Peptide Derived from Human Papillomavirus
TDWCITGY

SEQ ID NO: 42870 - protein, 11 aa, Artificial Sequence
  Peptide Derived from Human Papillomavirus
TFKCSAGENTR

SEQ ID NO: 42871 - protein, 10 aa, Artificial Sequence
  Peptide Derived from Human Papillomavirus
TLQEISNVLH

SEQ ID NO: 42872 - protein, 8 aa, Artificial Sequence
  Peptide Derived from Human Papillomavirus
TNAGTDSR

SEQ ID NO: 42873 - protein, 11 aa, Artificial Sequence
  Peptide Derived from Human Papillomavirus
TNAGTDSRWPY

SEQ ID NO: 42874 - protein, 8 aa, Artificial Sequence
  Peptide Derived from Human Papillomavirus
TNDGGNWR

SEQ ID NO: 42875 - protein, 11 aa, Artificial Sequence
  Peptide Derived from Human Papillomavirus
TSCTDWCITGY

SEQ ID NO: 42876 - protein, 11 aa, Artificial Sequence
  Peptide Derived from Human Papillomavirus
TSINKNKECTY

SEQ ID NO: 42877 - protein, 11 aa, Artificial Sequence
  Peptide Derived from Human Papillomavirus
TSNTNAGTDSR

SEQ ID NO: 42878 - protein, 8 aa, Artificial Sequence
  Peptide Derived from Human Papillomavirus
TTPEWIDR

SEQ ID NO: 42879 - protein, 10 aa, Artificial Sequence
  Peptide Derived from Human Papillomavirus
VAESLKVLIK

SEQ ID NO: 42880 - protein, 9 aa, Artificial Sequence
  Peptide Derived from Human Papillomavirus
VDRAANPCR

SEQ ID NO: 42881 - protein, 8 aa, Artificial Sequence
  Peptide Derived from Human Papillomavirus
VIEPPKLR

SEQ ID NO: 42882 - protein, 8 aa, Artificial Sequence
  Peptide Derived from Human Papillomavirus
VISCVNSK

SEQ ID NO: 42883 - protein, 10 aa, Artificial Sequence
  Peptide Derived from Human Papillomavirus
VISCVNSKSH

SEQ ID NO: 42884 - protein, 8 aa, Artificial Sequence
  Peptide Derived from Human Papillomavirus
VLHSSNTK

SEQ ID NO: 42885 - protein, 9 aa, Artificial Sequence
  Peptide Derived from Human Papillomavirus
VLIKQHSLY

SEQ ID NO: 42886 - protein, 11 aa, Artificial Sequence
  Peptide Derived from Human Papillomavirus
VLIKQHSLYTH

SEQ ID NO: 42887 - protein, 11 aa, Artificial Sequence
  Peptide Derived from Human Papillomavirus
VTLQEISNVLH

SEQ ID NO: 42888 - protein, 8 aa, Artificial Sequence
  Peptide Derived from Human Papillomavirus
VTPISWTY

SEQ ID NO: 42889 - protein, 10 aa, Artificial Sequence
  Peptide Derived from Human Papillomavirus
VVDRAANPCR

SEQ ID NO: 42890 - protein, 10 aa, Artificial Sequence
  Peptide Derived from Human Papillomavirus
WFEVEAVIER

SEQ ID NO: 42891 - protein, 11 aa, Artificial Sequence
  Peptide Derived from Human Papillomavirus
WFEVEAVIERR

SEQ ID NO: 42892 - protein, 10 aa, Artificial Sequence
  Peptide Derived from Human Papillomavirus
WIDRLTVLQH

SEQ ID NO: 42893 - protein, 8 aa, Artificial Sequence
  Peptide Derived from Human Papillomavirus
WIQSRCEK

SEQ ID NO: 42894 - protein, 9 aa, Artificial Sequence
  Peptide Derived from Human Papillomavirus
WLQPLSDAK

SEQ ID NO: 42895 - protein, 9 aa, Artificial Sequence
  Peptide Derived from Human Papillomavirus
WTYIDDYMR

SEQ ID NO: 42896 - protein, 9 aa, Artificial Sequence
  Peptide Derived from Human Papillomavirus
YAINDENWK

SEQ ID NO: 42897 - protein, 11 aa, Artificial Sequence
  Peptide Derived from Human Papillomavirus
YFGMSLIQFLK

SEQ ID NO: 42898 - protein, 10 aa, Artificial Sequence
  Peptide Derived from Human Papillomavirus
YGISFMELVR

SEQ ID NO: 42899 - protein, 11 aa, Artificial Sequence
  Peptide Derived from Human Papillomavirus
YTHLQCLTCDR

SEQ ID NO: 42900 - protein, 10 aa, Artificial Sequence
  Peptide Derived from Human Papillomavirus
ADIQTDNDNR

SEQ ID NO: 42901 - protein, 8 aa, Artificial Sequence
  Peptide Derived from Human Papillomavirus
ADPALDNR

SEQ ID NO: 42902 - protein, 11 aa, Artificial Sequence
  Peptide Derived from Human Papillomavirus
ADPALDNRTAR

SEQ ID NO: 42903 - protein, 8 aa, Artificial Sequence
  Peptide Derived from Human Papillomavirus
ALDNRTAR

SEQ ID NO: 42904 - protein, 10 aa, Artificial Sequence
  Peptide Derived from Human Papillomavirus
ALETLSKSQY

SEQ ID NO: 42905 - protein, 9 aa, Artificial Sequence
  Peptide Derived from Human Papillomavirus
ATNCTNKQR

SEQ ID NO: 42906 - protein, 10 aa, Artificial Sequence
  Peptide Derived from Human Papillomavirus
AVQEKILDLY

SEQ ID NO: 42907 - protein, 9 aa, Artificial Sequence
  Peptide Derived from Human Papillomavirus
CADPALDNR

SEQ ID NO: 42908 - protein, 8 aa, Artificial Sequence
  Peptide Derived from Human Papillomavirus
CALLYTAK

SEQ ID NO: 42909 - protein, 9 aa, Artificial Sequence
  Peptide Derived from Human Papillomavirus
CLRYRLKPY

SEQ ID NO: 42910 - protein, 10 aa, Artificial Sequence
  Peptide Derived from Human Papillomavirus
CLRYRLKPYK

SEQ ID NO: 42911 - protein, 10 aa, Artificial Sequence
  Peptide Derived from Human Papillomavirus
CSSNVAPIVH

SEQ ID NO: 42912 - protein, 10 aa, Artificial Sequence
  Peptide Derived from Human Papillomavirus
CTMVTGKVDY

SEQ ID NO: 42913 - protein, 9 aa, Artificial Sequence
  Peptide Derived from Human Papillomavirus
DIQTDNDNR

SEQ ID NO: 42914 - protein, 8 aa, Artificial Sequence
  Peptide Derived from Human Papillomavirus
DLPSQIEH

SEQ ID NO: 42915 - protein, 10 aa, Artificial Sequence
  Peptide Derived from Human Papillomavirus
DLPSQIEHWK

SEQ ID NO: 42916 - protein, 10 aa, Artificial Sequence
  Peptide Derived from Human Papillomavirus
DNDKKNTMDY

SEQ ID NO: 42917 - protein, 10 aa, Artificial Sequence
  Peptide Derived from Human Papillomavirus
DNRPPQAAAK

SEQ ID NO: 42918 - protein, 11 aa, Artificial Sequence
  Peptide Derived from Human Papillomavirus
DNRPPQAAAKR

SEQ ID NO: 42919 - protein, 8 aa, Artificial Sequence
  Peptide Derived from Human Papillomavirus
DTAQPLTK

SEQ ID NO: 42920 - protein, 9 aa, Artificial Sequence
  Peptide Derived from Human Papillomavirus
DTCTMVTGK

SEQ ID NO: 42921 - protein, 11 aa, Artificial Sequence
  Peptide Derived from Human Papillomavirus
DTTDTAQPLTK

SEQ ID NO: 42922 - protein, 9 aa, Artificial Sequence
  Peptide Derived from Human Papillomavirus
ECALLYTAK

SEQ ID NO: 42923 - protein, 8 aa, Artificial Sequence
  Peptide Derived from Human Papillomavirus
EDAAKYSK

SEQ ID NO: 42924 - protein, 10 aa, Artificial Sequence
  Peptide Derived from Human Papillomavirus
EDTCTMVTGK

SEQ ID NO: 42925 - protein, 11 aa, Artificial Sequence
  Peptide Derived from Human Papillomavirus
ELQMALETLSK

SEQ ID NO: 42926 - protein, 11 aa, Artificial Sequence
  Peptide Derived from Human Papillomavirus
ELYSSMSSTWH

SEQ ID NO: 42927 - protein, 9 aa, Artificial Sequence
  Peptide Derived from Human Papillomavirus
ESNSLKCLR

SEQ ID NO: 42928 - protein, 10 aa, Artificial Sequence
  Peptide Derived from Human Papillomavirus
ESNSLKCLRY

SEQ ID NO: 42929 - protein, 11 aa, Artificial Sequence
  Peptide Derived from Human Papillomavirus
ESNSLKCLRYR

SEQ ID NO: 42930 - protein, 8 aa, Artificial Sequence
  Peptide Derived from Human Papillomavirus
ETLSKSQY

SEQ ID NO: 42931 - protein, 11 aa, Artificial Sequence
  Peptide Derived from Human Papillomavirus
ETVTVQYDNDK

SEQ ID NO: 42932 - protein, 9 aa, Artificial Sequence
  Peptide Derived from Human Papillomavirus
EVWLCEPPK

SEQ ID NO: 42933 - protein, 10 aa, Artificial Sequence
  Peptide Derived from Human Papillomavirus
FCADPALDNR

SEQ ID NO: 42934 - protein, 10 aa, Artificial Sequence
  Peptide Derived from Human Papillomavirus
GMYYIHNCEK

SEQ ID NO: 42935 - protein, 10 aa, Artificial Sequence
  Peptide Derived from Human Papillomavirus
HLKGESNSLK

SEQ ID NO: 42936 - protein, 9 aa, Artificial Sequence
  Peptide Derived from Human Papillomavirus
HNCEKVYFK

SEQ ID NO: 42937 - protein, 10 aa, Artificial Sequence
  Peptide Derived from Human Papillomavirus
HNCEKVYFKY

SEQ ID NO: 42938 - protein, 11 aa, Artificial Sequence
  Peptide Derived from Human Papillomavirus
IGMYYIHNCEK

SEQ ID NO: 42939 - protein, 9 aa, Artificial Sequence
  Peptide Derived from Human Papillomavirus
ILDLYEADK

SEQ ID NO: 42940 - protein, 11 aa, Artificial Sequence
  Peptide Derived from Human Papillomavirus
ISARLNAVQEK

SEQ ID NO: 42941 - protein, 8 aa, Artificial Sequence
  Peptide Derived from Human Papillomavirus
KCLRYRLK

SEQ ID NO: 42942 - protein, 10 aa, Artificial Sequence
  Peptide Derived from Human Papillomavirus
KCLRYRLKPY

SEQ ID NO: 42943 - protein, 11 aa, Artificial Sequence
  Peptide Derived from Human Papillomavirus
KCLRYRLKPYK

SEQ ID NO: 42944 - protein, 8 aa, Artificial Sequence
  Peptide Derived from Human Papillomavirus
KGESNSLK

SEQ ID NO: 42945 - protein, 11 aa, Artificial Sequence
  Peptide Derived from Human Papillomavirus
KGESNSLKCLR

SEQ ID NO: 42946 - protein, 10 aa, Artificial Sequence
  Peptide Derived from Human Papillomavirus
KILDLYEADK

SEQ ID NO: 42947 - protein, 11 aa, Artificial Sequence
  Peptide Derived from Human Papillomavirus
KLIRMECALLY

SEQ ID NO: 42948 - protein, 10 aa, Artificial Sequence
  Peptide Derived from Human Papillomavirus
KTDLPSQIEH

SEQ ID NO: 42949 - protein, 8 aa, Artificial Sequence
  Peptide Derived from Human Papillomavirus
KTQMWEVH

SEQ ID NO: 42950 - protein, 8 aa, Artificial Sequence
  Peptide Derived from Human Papillomavirus
KVDYIGMY

SEQ ID NO: 42951 - protein, 9 aa, Artificial Sequence
  Peptide Derived from Human Papillomavirus
KVDYIGMYY

SEQ ID NO: 42952 - protein, 11 aa, Artificial Sequence
  Peptide Derived from Human Papillomavirus
KVDYIGMYYIH

SEQ ID NO: 42953 - protein, 8 aa, Artificial Sequence
  Peptide Derived from Human Papillomavirus
KVYFKYFK

SEQ ID NO: 42954 - protein, 9 aa, Artificial Sequence
  Peptide Derived from Human Papillomavirus
LCEPPKCFK

SEQ ID NO: 42955 - protein, 10 aa, Artificial Sequence
  Peptide Derived from Human Papillomavirus
LCEPPKCFKK

SEQ ID NO: 42956 - protein, 8 aa, Artificial Sequence
  Peptide Derived from Human Papillomavirus
LDLYEADK

SEQ ID NO: 42957 - protein, 11 aa, Artificial Sequence
  Peptide Derived from Human Papillomavirus
LFCADPALDNR

SEQ ID NO: 42958 - protein, 10 aa, Artificial Sequence
  Peptide Derived from Human Papillomavirus
LIRMECALLY

SEQ ID NO: 42959 - protein, 8 aa, Artificial Sequence
  Peptide Derived from Human Papillomavirus
MALETLSK

SEQ ID NO: 42960 - protein, 11 aa, Artificial Sequence
  Peptide Derived from Human Papillomavirus
MALETLSKSQY

SEQ ID NO: 42961 - protein, 10 aa, Artificial Sequence
  Peptide Derived from Human Papillomavirus
MDYTNWGEIY

SEQ ID NO: 42962 - protein, 8 aa, Artificial Sequence
  Peptide Derived from Human Papillomavirus
MGFSHLCH

SEQ ID NO: 42963 - protein, 8 aa, Artificial Sequence
  Peptide Derived from Human Papillomavirus
MVTGKVDY

SEQ ID NO: 42964 - protein, 11 aa, Artificial Sequence
  Peptide Derived from Human Papillomavirus
NAVQEKILDLY

SEQ ID NO: 42965 - protein, 8 aa, Artificial Sequence
  Peptide Derived from Human Papillomavirus
NCEKVYFK

SEQ ID NO: 42966 - protein, 9 aa, Artificial Sequence
  Peptide Derived from Human Papillomavirus
NCEKVYFKY

SEQ ID NO: 42967 - protein, 11 aa, Artificial Sequence
  Peptide Derived from Human Papillomavirus
NCEKVYFKYFK

SEQ ID NO: 42968 - protein, 9 aa, Artificial Sequence
  Peptide Derived from Human Papillomavirus
NDKKNTMDY

SEQ ID NO: 42969 - protein, 11 aa, Artificial Sequence
  Peptide Derived from Human Papillomavirus
NDNRPPQAAAK

SEQ ID NO: 42970 - protein, 8 aa, Artificial Sequence
  Peptide Derived from Human Papillomavirus
NSLKCLRY

SEQ ID NO: 42971 - protein, 9 aa, Artificial Sequence
  Peptide Derived from Human Papillomavirus
NSLKCLRYR

SEQ ID NO: 42972 - protein, 11 aa, Artificial Sequence
  Peptide Derived from Human Papillomavirus
NSLKCLRYRLK

SEQ ID NO: 42973 - protein, 9 aa, Artificial Sequence
  Peptide Derived from Human Papillomavirus
NVAPIVHLK

SEQ ID NO: 42974 - protein, 9 aa, Artificial Sequence
  Peptide Derived from Human Papillomavirus
PALDNRTAR

SEQ ID NO: 42975 - protein, 9 aa, Artificial Sequence
  Peptide Derived from Human Papillomavirus
PSLLASKTK

SEQ ID NO: 42976 - protein, 8 aa, Artificial Sequence
  Peptide Derived from Human Papillomavirus
PSQIEHWK

SEQ ID NO: 42977 - protein, 11 aa, Artificial Sequence
  Peptide Derived from Human Papillomavirus
PSQIEHWKLIR

SEQ ID NO: 42978 - protein, 8 aa, Artificial Sequence
  Peptide Derived from Human Papillomavirus
QAAAKRRR

SEQ ID NO: 42979 - protein, 9 aa, Artificial Sequence
  Peptide Derived from Human Papillomavirus
QGETVTVQY

SEQ ID NO: 42980 - protein, 9 aa, Artificial Sequence
  Peptide Derived from Human Papillomavirus
QIEHWKLIR

SEQ ID NO: 42981 - protein, 9 aa, Artificial Sequence
  Peptide Derived from Human Papillomavirus
QMALETLSK

SEQ ID NO: 42982 - protein, 8 aa, Artificial Sequence
  Peptide Derived from Human Papillomavirus
QMFLGTVK

SEQ ID NO: 42983 - protein, 9 aa, Artificial Sequence
  Peptide Derived from Human Papillomavirus
QMGFSHLCH

SEQ ID NO: 42984 - protein, 10 aa, Artificial Sequence
  Peptide Derived from Human Papillomavirus
QVVPSLLASK

SEQ ID NO: 42985 - protein, 9 aa, Artificial Sequence
  Peptide Derived from Human Papillomavirus
RLKPYKELY

SEQ ID NO: 42986 - protein, 8 aa, Artificial Sequence
  Peptide Derived from Human Papillomavirus
RLNAVQEK

SEQ ID NO: 42987 - protein, 8 aa, Artificial Sequence
  Peptide Derived from Human Papillomavirus
RMECALLY

SEQ ID NO: 42988 - protein, 11 aa, Artificial Sequence
  Peptide Derived from Human Papillomavirus
RMECALLYTAK

SEQ ID NO: 42989 - protein, 9 aa, Artificial Sequence
  Peptide Derived from Human Papillomavirus
RTATNCTNK

SEQ ID NO: 42990 - protein, 11 aa, Artificial Sequence
  Peptide Derived from Human Papillomavirus
RTATNCTNKQR

SEQ ID NO: 42991 - protein, 10 aa, Artificial Sequence
  Peptide Derived from Human Papillomavirus
SARLNAVQEK

SEQ ID NO: 42992 - protein, 11 aa, Artificial Sequence
  Peptide Derived from Human Papillomavirus
SLEVWLCEPPK

SEQ ID NO: 42993 - protein, 8 aa, Artificial Sequence
  Peptide Derived from Human Papillomavirus
SLKCLRYR

SEQ ID NO: 42994 - protein, 10 aa, Artificial Sequence
  Peptide Derived from Human Papillomavirus
SLKCLRYRLK

SEQ ID NO: 42995 - protein, 8 aa, Artificial Sequence
  Peptide Derived from Human Papillomavirus
SLLASKTK

SEQ ID NO: 42996 - protein, 8 aa, Artificial Sequence
  Peptide Derived from Human Papillomavirus
SNSLKCLR

SEQ ID NO: 42997 - protein, 9 aa, Artificial Sequence
  Peptide Derived from Human Papillomavirus
SNSLKCLRY

SEQ ID NO: 42998 - protein, 10 aa, Artificial Sequence
  Peptide Derived from Human Papillomavirus
SNSLKCLRYR

SEQ ID NO: 42999 - protein, 8 aa, Artificial Sequence
  Peptide Derived from Human Papillomavirus
SNVAPIVH

SEQ ID NO: 43000 - protein, 10 aa, Artificial Sequence
  Peptide Derived from Human Papillomavirus
SNVAPIVHLK

SEQ ID NO: 43001 - protein, 8 aa, Artificial Sequence
  Peptide Derived from Human Papillomavirus
SSMSSTWH

SEQ ID NO: 43002 - protein, 9 aa, Artificial Sequence
  Peptide Derived from Human Papillomavirus
SSNVAPIVH

SEQ ID NO: 43003 - protein, 11 aa, Artificial Sequence
  Peptide Derived from Human Papillomavirus
SSNVAPIVHLK

SEQ ID NO: 43004 - protein, 11 aa, Artificial Sequence
  Peptide Derived from Human Papillomavirus
SSTWHWTSDNK

SEQ ID NO: 43005 - protein, 10 aa, Artificial Sequence
  Peptide Derived from Human Papillomavirus
STWHWTSDNK

SEQ ID NO: 43006 - protein, 11 aa, Artificial Sequence
  Peptide Derived from Human Papillomavirus
TADIQTDNDNR

SEQ ID NO: 43007 - protein, 9 aa, Artificial Sequence
  Peptide Derived from Human Papillomavirus
TAKQMGFSH

SEQ ID NO: 43008 - protein, 11 aa, Artificial Sequence
  Peptide Derived from Human Papillomavirus
TARTATNCTNK

SEQ ID NO: 43009 - protein, 8 aa, Artificial Sequence
  Peptide Derived from Human Papillomavirus
TATNCTNK

SEQ ID NO: 43010 - protein, 10 aa, Artificial Sequence
  Peptide Derived from Human Papillomavirus
TATNCTNKQR

SEQ ID NO: 43011 - protein, 8 aa, Artificial Sequence
  Peptide Derived from Human Papillomavirus
TCTMVTGK

SEQ ID NO: 43012 - protein, 11 aa, Artificial Sequence
  Peptide Derived from Human Papillomavirus
TCTMVTGKVDY

SEQ ID NO: 43013 - protein, 9 aa, Artificial Sequence
  Peptide Derived from Human Papillomavirus
TDLPSQIEH

SEQ ID NO: 43014 - protein, 11 aa, Artificial Sequence
  Peptide Derived from Human Papillomavirus
TDLPSQIEHWK

SEQ ID NO: 43015 - protein, 9 aa, Artificial Sequence
  Peptide Derived from Human Papillomavirus
TDTAQPLTK

SEQ ID NO: 43016 - protein, 10 aa, Artificial Sequence
  Peptide Derived from Human Papillomavirus
TGKVDYIGMY

SEQ ID NO: 43017 - protein, 11 aa, Artificial Sequence
  Peptide Derived from Human Papillomavirus
TGKVDYIGMYY

SEQ ID NO: 43018 - protein, 11 aa, Artificial Sequence
  Peptide Derived from Human Papillomavirus
TMDYTNWGEIY

SEQ ID NO: 43019 - protein, 9 aa, Artificial Sequence
  Peptide Derived from Human Papillomavirus
TMVTGKVDY

SEQ ID NO: 43020 - protein, 8 aa, Artificial Sequence
  Peptide Derived from Human Papillomavirus
TNCTNKQR

SEQ ID NO: 43021 - protein, 8 aa, Artificial Sequence
  Peptide Derived from Human Papillomavirus
TSDNKNSK

SEQ ID NO: 43022 - protein, 10 aa, Artificial Sequence
  Peptide Derived from Human Papillomavirus
TTDTAQPLTK

SEQ ID NO: 43023 - protein, 8 aa, Artificial Sequence
  Peptide Derived from Human Papillomavirus
TVQYDNDK

SEQ ID NO: 43024 - protein, 9 aa, Artificial Sequence
  Peptide Derived from Human Papillomavirus
TVQYDNDKK

SEQ ID NO: 43025 - protein, 10 aa, Artificial Sequence
  Peptide Derived from Human Papillomavirus
TVTVQYDNDK

SEQ ID NO: 43026 - protein, 11 aa, Artificial Sequence
  Peptide Derived from Human Papillomavirus
TVTVQYDNDKK

SEQ ID NO: 43027 - protein, 8 aa, Artificial Sequence
  Peptide Derived from Human Papillomavirus
VAPIVHLK

SEQ ID NO: 43028 - protein, 11 aa, Artificial Sequence
  Peptide Derived from Human Papillomavirus
VCSSNVAPIVH

SEQ ID NO: 43029 - protein, 8 aa, Artificial Sequence
  Peptide Derived from Human Papillomavirus
VDYIGMYY

SEQ ID NO: 43030 - protein, 10 aa, Artificial Sequence
  Peptide Derived from Human Papillomavirus
VDYIGMYYIH

SEQ ID NO: 43031 - protein, 11 aa, Artificial Sequence
  Peptide Derived from Human Papillomavirus
VTGKVDYIGMY

SEQ ID NO: 43032 - protein, 9 aa, Artificial Sequence
  Peptide Derived from Human Papillomavirus
VTVQYDNDK

SEQ ID NO: 43033 - protein, 10 aa, Artificial Sequence
  Peptide Derived from Human Papillomavirus
VTVQYDNDKK

SEQ ID NO: 43034 - protein, 9 aa, Artificial Sequence
  Peptide Derived from Human Papillomavirus
VVPSLLASK

SEQ ID NO: 43035 - protein, 11 aa, Artificial Sequence
  Peptide Derived from Human Papillomavirus
VVPSLLASKTK

SEQ ID NO: 43036 - protein, 10 aa, Artificial Sequence
  Peptide Derived from Human Papillomavirus
WLCEPPKCFK

SEQ ID NO: 43037 - protein, 11 aa, Artificial Sequence
  Peptide Derived from Human Papillomavirus
WLCEPPKCFKK

SEQ ID NO: 43038 - protein, 9 aa, Artificial Sequence
  Peptide Derived from Human Papillomavirus
WTSDNKNSK

SEQ ID NO: 43039 - protein, 11 aa, Artificial Sequence
  Peptide Derived from Human Papillomavirus
YDNDKKNTMDY

SEQ ID NO: 43040 - protein, 8 aa, Artificial Sequence
  Peptide Derived from Human Papillomavirus
YFKEDAAK

SEQ ID NO: 43041 - protein, 9 aa, Artificial Sequence
  Peptide Derived from Human Papillomavirus
YFKEDAAKY

SEQ ID NO: 43042 - protein, 11 aa, Artificial Sequence
  Peptide Derived from Human Papillomavirus
YFKEDAAKYSK

SEQ ID NO: 43043 - protein, 11 aa, Artificial Sequence
  Peptide Derived from Human Papillomavirus
YFKYFKEDAAK

SEQ ID NO: 43044 - protein, 8 aa, Artificial Sequence
  Peptide Derived from Human Papillomavirus
YIGMYYIH

SEQ ID NO: 43045 - protein, 9 aa, Artificial Sequence
  Peptide Derived from Human Papillomavirus
YIHNCEKVY

SEQ ID NO: 43046 - protein, 11 aa, Artificial Sequence
  Peptide Derived from Human Papillomavirus
YIHNCEKVYFK

SEQ ID NO: 43047 - protein, 10 aa, Artificial Sequence
  Peptide Derived from Human Papillomavirus
YSKTQMWEVH

SEQ ID NO: 43048 - protein, 9 aa, Artificial Sequence
  Peptide Derived from Human Papillomavirus
YSSMSSTWH

SEQ ID NO: 43049 - protein, 10 aa, Artificial Sequence
  Peptide Derived from Human Papillomavirus
YTAKQMGFSH

SEQ ID NO: 43050 - protein, 8 aa, Artificial Sequence
  Peptide Derived from Human Papillomavirus
YTNWGEIY

SEQ ID NO: 43051 - protein, 8 aa, Artificial Sequence
  Peptide Derived from Human Papillomavirus
CINFHAQH

SEQ ID NO: 43052 - protein, 8 aa, Artificial Sequence
  Peptide Derived from Human Papillomavirus
FCYLLFLY

SEQ ID NO: 43053 - protein, 9 aa, Artificial Sequence
  Peptide Derived from Human Papillomavirus
FFCYLLFLY

SEQ ID NO: 43054 - protein, 9 aa, Artificial Sequence
  Peptide Derived from Human Papillomavirus
FLCLSLLLR

SEQ ID NO: 43055 - protein, 10 aa, Artificial Sequence
  Peptide Derived from Human Papillomavirus
GSPLKIFFCY

SEQ ID NO: 43056 - protein, 10 aa, Artificial Sequence
  Peptide Derived from Human Papillomavirus
IFFCYLLFLY

SEQ ID NO: 43057 - protein, 11 aa, Artificial Sequence
  Peptide Derived from Human Papillomavirus
ILFLCLSLLLR

SEQ ID NO: 43058 - protein, 11 aa, Artificial Sequence
  Peptide Derived from Human Papillomavirus
KIFFCYLLFLY

SEQ ID NO: 43059 - protein, 8 aa, Artificial Sequence
  Peptide Derived from Human Papillomavirus
LCLSLLLR

SEQ ID NO: 43060 - protein, 10 aa, Artificial Sequence
  Peptide Derived from Human Papillomavirus
LFLCLSLLLR

SEQ ID NO: 43061 - protein, 8 aa, Artificial Sequence
  Peptide Derived from Human Papillomavirus
LILSISTY

SEQ ID NO: 43062 - protein, 11 aa, Artificial Sequence
  Peptide Derived from Human Papillomavirus
LLWVFVGSPLK

SEQ ID NO: 43063 - protein, 9 aa, Artificial Sequence
  Peptide Derived from Human Papillomavirus
MCINFHAQH

SEQ ID NO: 43064 - protein, 10 aa, Artificial Sequence
  Peptide Derived from Human Papillomavirus
MMCINFHAQH

SEQ ID NO: 43065 - protein, 9 aa, Artificial Sequence
  Peptide Derived from Human Papillomavirus
PLILSISTY

SEQ ID NO: 43066 - protein, 8 aa, Artificial Sequence
  Peptide Derived from Human Papillomavirus
PLKIFFCY

SEQ ID NO: 43067 - protein, 8 aa, Artificial Sequence
  Peptide Derived from Human Papillomavirus
PMMCINFH

SEQ ID NO: 43068 - protein, 11 aa, Artificial Sequence
  Peptide Derived from Human Papillomavirus
PMMCINFHAQH

SEQ ID NO: 43069 - protein, 8 aa, Artificial Sequence
  Peptide Derived from Human Papillomavirus
VFVGSPLK

SEQ ID NO: 43070 - protein, 11 aa, Artificial Sequence
  Peptide Derived from Human Papillomavirus
VGSPLKIFFCY

SEQ ID NO: 43071 - protein, 9 aa, Artificial Sequence
  Peptide Derived from Human Papillomavirus
WVFVGSPLK

SEQ ID NO: 43072 - protein, 10 aa, Artificial Sequence
  Peptide Derived from Human Papillomavirus
YLPMMCINFH

SEQ ID NO: 43073 - protein, 8 aa, Artificial Sequence
  Peptide Derived from Human Papillomavirus
AACWRSRR

SEQ ID NO: 43074 - protein, 9 aa, Artificial Sequence
  Peptide Derived from Human Papillomavirus
AACWRSRRR

SEQ ID NO: 43075 - protein, 8 aa, Artificial Sequence
  Peptide Derived from Human Papillomavirus
ACWRSRRR

SEQ ID NO: 43076 - protein, 8 aa, Artificial Sequence
  Peptide Derived from Human Papillomavirus
ADLTVVYR

SEQ ID NO: 43077 - protein, 9 aa, Artificial Sequence
  Peptide Derived from Human Papillomavirus
AFADLTVVY

SEQ ID NO: 43078 - protein, 10 aa, Artificial Sequence
  Peptide Derived from Human Papillomavirus
AFADLTVVYR

SEQ ID NO: 43079 - protein, 9 aa, Artificial Sequence
  Peptide Derived from Human Papillomavirus
AGRCAACWR

SEQ ID NO: 43080 - protein, 11 aa, Artificial Sequence
  Peptide Derived from Human Papillomavirus
AGRCAACWRSR

SEQ ID NO: 43081 - protein, 8 aa, Artificial Sequence
  Peptide Derived from Human Papillomavirus
CAACWRSR

SEQ ID NO: 43082 - protein, 9 aa, Artificial Sequence
  Peptide Derived from Human Papillomavirus
CAACWRSRR

SEQ ID NO: 43083 - protein, 10 aa, Artificial Sequence
  Peptide Derived from Human Papillomavirus
CAACWRSRRR

SEQ ID NO: 43084 - protein, 11 aa, Artificial Sequence
  Peptide Derived from Human Papillomavirus
CLRFLSKISEY

SEQ ID NO: 43085 - protein, 10 aa, Artificial Sequence
  Peptide Derived from Human Papillomavirus
CVECKKPLQR

SEQ ID NO: 43086 - protein, 11 aa, Artificial Sequence
  Peptide Derived from Human Papillomavirus
DFAFADLTVVY

SEQ ID NO: 43087 - protein, 11 aa, Artificial Sequence
  Peptide Derived from Human Papillomavirus
DLCQALETTIH

SEQ ID NO: 43088 - protein, 10 aa, Artificial Sequence
  Peptide Derived from Human Papillomavirus
DTEEKPRTLH

SEQ ID NO: 43089 - protein, 8 aa, Artificial Sequence
  Peptide Derived from Human Papillomavirus
ECKKPLQR

SEQ ID NO: 43090 - protein, 9 aa, Artificial Sequence
  Peptide Derived from Human Papillomavirus
EGNPFGICK

SEQ ID NO: 43091 - protein, 11 aa, Artificial Sequence
  Peptide Derived from Human Papillomavirus
EILIRCIICQR

SEQ ID NO: 43092 - protein, 8 aa, Artificial Sequence
  Peptide Derived from Human Papillomavirus
ELQCVECK

SEQ ID NO: 43093 - protein, 9 aa, Artificial Sequence
  Peptide Derived from Human Papillomavirus
ELQCVECKK

SEQ ID NO: 43094 - protein, 8 aa, Artificial Sequence
  Peptide Derived from Human Papillomavirus
FADLTVVY

SEQ ID NO: 43095 - protein, 9 aa, Artificial Sequence
  Peptide Derived from Human Papillomavirus
FADLTVVYR

SEQ ID NO: 43096 - protein, 10 aa, Artificial Sequence
  Peptide Derived from Human Papillomavirus
FAFADLTVVY

SEQ ID NO: 43097 - protein, 11 aa, Artificial Sequence
  Peptide Derived from Human Papillomavirus
FAFADLTVVYR

SEQ ID NO: 43098 - protein, 9 aa, Artificial Sequence
  Peptide Derived from Human Papillomavirus
FGICKLCLR

SEQ ID NO: 43099 - protein, 8 aa, Artificial Sequence
  Peptide Derived from Human Papillomavirus
FLSKISEY

SEQ ID NO: 43100 - protein, 9 aa, Artificial Sequence
  Peptide Derived from Human Papillomavirus
FLSKISEYR

SEQ ID NO: 43101 - protein, 10 aa, Artificial Sequence
  Peptide Derived from Human Papillomavirus
FLSKISEYRH

SEQ ID NO: 43102 - protein, 11 aa, Artificial Sequence
  Peptide Derived from Human Papillomavirus
FLSKISEYRHY

SEQ ID NO: 43103 - protein, 8 aa, Artificial Sequence
  Peptide Derived from Human Papillomavirus
GICKLCLR

SEQ ID NO: 43104 - protein, 8 aa, Artificial Sequence
  Peptide Derived from Human Papillomavirus
GNPFGICK

SEQ ID NO: 43105 - protein, 9 aa, Artificial Sequence
  Peptide Derived from Human Papillomavirus
GNTLEQTVK

SEQ ID NO: 43106 - protein, 10 aa, Artificial Sequence
  Peptide Derived from Human Papillomavirus
GNTLEQTVKK

SEQ ID NO: 43107 - protein, 11 aa, Artificial Sequence
  Peptide Derived from Human Papillomavirus
HNIELQCVECK

SEQ ID NO: 43108 - protein, 10 aa, Artificial Sequence
  Peptide Derived from Human Papillomavirus
HNISGRWAGR

SEQ ID NO: 43109 - protein, 9 aa, Artificial Sequence
  Peptide Derived from Human Papillomavirus
HVDLNKRFH

SEQ ID NO: 43110 - protein, 11 aa, Artificial Sequence
  Peptide Derived from Human Papillomavirus
ICKLCLRFLSK

SEQ ID NO: 43111 - protein, 11 aa, Artificial Sequence
  Peptide Derived from Human Papillomavirus
ICQRPLCPQEK

SEQ ID NO: 43112 - protein, 10 aa, Artificial Sequence
  Peptide Derived from Human Papillomavirus
ILIRCIICQR

SEQ ID NO: 43113 - protein, 9 aa, Artificial Sequence
  Peptide Derived from Human Papillomavirus
ISEYRHYNY

SEQ ID NO: 43114 - protein, 8 aa, Artificial Sequence
  Peptide Derived from Human Papillomavirus
ISGRWAGR

SEQ ID NO: 43115 - protein, 8 aa, Artificial Sequence
  Peptide Derived from Human Papillomavirus
KISEYRHY

SEQ ID NO: 43116 - protein, 10 aa, Artificial Sequence
  Peptide Derived from Human Papillomavirus
KISEYRHYNY

SEQ ID NO: 43117 - protein, 9 aa, Artificial Sequence
  Peptide Derived from Human Papillomavirus
KLCLRFLSK

SEQ ID NO: 43118 - protein, 8 aa, Artificial Sequence
  Peptide Derived from Human Papillomavirus
LCLRFLSK

SEQ ID NO: 43119 - protein, 8 aa, Artificial Sequence
  Peptide Derived from Human Papillomavirus
LCPQEKKR

SEQ ID NO: 43120 - protein, 9 aa, Artificial Sequence
  Peptide Derived from Human Papillomavirus
LCPQEKKRH

SEQ ID NO: 43121 - protein, 10 aa, Artificial Sequence
  Peptide Derived from Human Papillomavirus
LCQALETTIH

SEQ ID NO: 43122 - protein, 9 aa, Artificial Sequence
  Peptide Derived from Human Papillomavirus
LIRCIICQR

SEQ ID NO: 43123 - protein, 11 aa, Artificial Sequence
  Peptide Derived from Human Papillomavirus
LNKRFHNISGR

SEQ ID NO: 43124 - protein, 8 aa, Artificial Sequence
  Peptide Derived from Human Papillomavirus
LSKISEYR

SEQ ID NO: 43125 - protein, 9 aa, Artificial Sequence
  Peptide Derived from Human Papillomavirus
LSKISEYRH

SEQ ID NO: 43126 - protein, 10 aa, Artificial Sequence
  Peptide Derived from Human Papillomavirus
LSKISEYRHY

SEQ ID NO: 43127 - protein, 8 aa, Artificial Sequence
  Peptide Derived from Human Papillomavirus
MFQDTEEK

SEQ ID NO: 43128 - protein, 10 aa, Artificial Sequence
  Peptide Derived from Human Papillomavirus
MFQDTEEKPR

SEQ ID NO: 43129 - protein, 10 aa, Artificial Sequence
  Peptide Derived from Human Papillomavirus
NIELQCVECK

SEQ ID NO: 43130 - protein, 11 aa, Artificial Sequence
  Peptide Derived from Human Papillomavirus
NIELQCVECKK

SEQ ID NO: 43131 - protein, 9 aa, Artificial Sequence
  Peptide Derived from Human Papillomavirus
NISGRWAGR

SEQ ID NO: 43132 - protein, 8 aa, Artificial Sequence
  Peptide Derived from Human Papillomavirus
NTLEQTVK

SEQ ID NO: 43133 - protein, 9 aa, Artificial Sequence
  Peptide Derived from Human Papillomavirus
NTLEQTVKK

SEQ ID NO: 43134 - protein, 10 aa, Artificial Sequence
  Peptide Derived from Human Papillomavirus
PFGICKLCLR

SEQ ID NO: 43135 - protein, 8 aa, Artificial Sequence
  Peptide Derived from Human Papillomavirus
PLCPQEKK

SEQ ID NO: 43136 - protein, 9 aa, Artificial Sequence
  Peptide Derived from Human Papillomavirus
PLCPQEKKR

SEQ ID NO: 43137 - protein, 10 aa, Artificial Sequence
  Peptide Derived from Human Papillomavirus
PLCPQEKKRH

SEQ ID NO: 43138 - protein, 8 aa, Artificial Sequence
  Peptide Derived from Human Papillomavirus
PLNEILIR

SEQ ID NO: 43139 - protein, 8 aa, Artificial Sequence
  Peptide Derived from Human Papillomavirus
PLQRSEVY

SEQ ID NO: 43140 - protein, 8 aa, Artificial Sequence
  Peptide Derived from Human Papillomavirus
QALETTIH

SEQ ID NO: 43141 - protein, 11 aa, Artificial Sequence
  Peptide Derived from Human Papillomavirus
QCVECKKPLQR

SEQ ID NO: 43142 - protein, 8 aa, Artificial Sequence
  Peptide Derived from Human Papillomavirus
QDTEEKPR

SEQ ID NO: 43143 - protein, 11 aa, Artificial Sequence
  Peptide Derived from Human Papillomavirus
QDTEEKPRTLH

SEQ ID NO: 43144 - protein, 9 aa, Artificial Sequence
  Peptide Derived from Human Papillomavirus
RCAACWRSR

SEQ ID NO: 43145 - protein, 10 aa, Artificial Sequence
  Peptide Derived from Human Papillomavirus
RCAACWRSRR

SEQ ID NO: 43146 - protein, 11 aa, Artificial Sequence
  Peptide Derived from Human Papillomavirus
RCAACWRSRRR

SEQ ID NO: 43147 - protein, 8 aa, Artificial Sequence
  Peptide Derived from Human Papillomavirus
RFHNISGR

SEQ ID NO: 43148 - protein, 9 aa, Artificial Sequence
  Peptide Derived from Human Papillomavirus
RFLSKISEY

SEQ ID NO: 43149 - protein, 10 aa, Artificial Sequence
  Peptide Derived from Human Papillomavirus
RFLSKISEYR

SEQ ID NO: 43150 - protein, 11 aa, Artificial Sequence
  Peptide Derived from Human Papillomavirus
RFLSKISEYRH

SEQ ID NO: 43151 - protein, 8 aa, Artificial Sequence
  Peptide Derived from Human Papillomavirus
TLEQTVKK

SEQ ID NO: 43152 - protein, 8 aa, Artificial Sequence
  Peptide Derived from Human Papillomavirus
VDLNKRFH

SEQ ID NO: 43153 - protein, 10 aa, Artificial Sequence
  Peptide Derived from Human Papillomavirus
WAGRCAACWR

SEQ ID NO: 43154 - protein, 10 aa, Artificial Sequence
  Peptide Derived from Human Papillomavirus
YGNTLEQTVK

SEQ ID NO: 43155 - protein, 11 aa, Artificial Sequence
  Peptide Derived from Human Papillomavirus
YGNTLEQTVKK

SEQ ID NO: 43156 - protein, 10 aa, Artificial Sequence
  Peptide Derived from Human Papillomavirus
ADYYIVTCCH

SEQ ID NO: 43157 - protein, 10 aa, Artificial Sequence
  Peptide Derived from Human Papillomavirus
CCHTCNTTVR

SEQ ID NO: 43158 - protein, 10 aa, Artificial Sequence
  Peptide Derived from Human Papillomavirus
CVNSTASDLR

SEQ ID NO: 43159 - protein, 11 aa, Artificial Sequence
  Peptide Derived from Human Papillomavirus
DGQAQPATADY

SEQ ID NO: 43160 - protein, 10 aa, Artificial Sequence
  Peptide Derived from Human Papillomavirus
DLYPEPTDLY

SEQ ID NO: 43161 - protein, 11 aa, Artificial Sequence
  Peptide Derived from Human Papillomavirus
DSSDEDEGLDR

SEQ ID NO: 43162 - protein, 8 aa, Artificial Sequence
  Peptide Derived from Human Papillomavirus
HTCNTTVR

SEQ ID NO: 43163 - protein, 11 aa, Artificial Sequence
  Peptide Derived from Human Papillomavirus
LCVNSTASDLR

SEQ ID NO: 43164 - protein, 11 aa, Artificial Sequence
  Peptide Derived from Human Papillomavirus
LDLYPEPTDLY

SEQ ID NO: 43165 - protein, 8 aa, Artificial Sequence
  Peptide Derived from Human Papillomavirus
NSTASDLR

SEQ ID NO: 43166 - protein, 11 aa, Artificial Sequence
  Peptide Derived from Human Papillomavirus
PTLKEYVLDLY

SEQ ID NO: 43167 - protein, 9 aa, Artificial Sequence
  Peptide Derived from Human Papillomavirus
QAQPATADY

SEQ ID NO: 43168 - protein, 10 aa, Artificial Sequence
  Peptide Derived from Human Papillomavirus
QAQPATADYY

SEQ ID NO: 43169 - protein, 8 aa, Artificial Sequence
  Peptide Derived from Human Papillomavirus
RGHKPTLK

SEQ ID NO: 43170 - protein, 10 aa, Artificial Sequence
  Peptide Derived from Human Papillomavirus
RGHKPTLKEY

SEQ ID NO: 43171 - protein, 9 aa, Artificial Sequence
  Peptide Derived from Human Papillomavirus
SDEDEGLDR

SEQ ID NO: 43172 - protein, 10 aa, Artificial Sequence
  Peptide Derived from Human Papillomavirus
SSDEDEGLDR

SEQ ID NO: 43173 - protein, 11 aa, Artificial Sequence
  Peptide Derived from Human Papillomavirus
TADYYIVTCCH

SEQ ID NO: 43174 - protein, 11 aa, Artificial Sequence
  Peptide Derived from Human Papillomavirus
TCCHTCNTTVR

SEQ ID NO: 43175 - protein, 10 aa, Artificial Sequence
  Peptide Derived from Human Papillomavirus
TLKEYVLDLY

SEQ ID NO: 43176 - protein, 9 aa, Artificial Sequence
  Peptide Derived from Human Papillomavirus
VNSTASDLR

SEQ ID NO: 43177 - protein, 9 aa, Artificial Sequence
  Peptide Derived from Human Papillomavirus
ACVGLEIGR

SEQ ID NO: 43178 - protein, 10 aa, Artificial Sequence
  Peptide Derived from Human Papillomavirus
ADLDQFPLGR

SEQ ID NO: 43179 - protein, 11 aa, Artificial Sequence
  Peptide Derived from Human Papillomavirus
ADLDQFPLGRK

SEQ ID NO: 43180 - protein, 11 aa, Artificial Sequence
  Peptide Derived from Human Papillomavirus
ADNRECLSMDY

SEQ ID NO: 43181 - protein, 8 aa, Artificial Sequence
  Peptide Derived from Human Papillomavirus
AGLKAKPK

SEQ ID NO: 43182 - protein, 10 aa, Artificial Sequence
  Peptide Derived from Human Papillomavirus
AGLKAKPKLK

SEQ ID NO: 43183 - protein, 11 aa, Artificial Sequence
  Peptide Derived from Human Papillomavirus
AGLKAKPKLKR

SEQ ID NO: 43184 - protein, 11 aa, Artificial Sequence
  Peptide Derived from Human Papillomavirus
AGSSRLLAVGH

SEQ ID NO: 43185 - protein, 11 aa, Artificial Sequence
  Peptide Derived from Human Papillomavirus
AITCQKTVPPK

SEQ ID NO: 43186 - protein, 8 aa, Artificial Sequence
  Peptide Derived from Human Papillomavirus
ASLQDTYR

SEQ ID NO: 43187 - protein, 10 aa, Artificial Sequence
  Peptide Derived from Human Papillomavirus
AVGHPYFSIK

SEQ ID NO: 43188 - protein, 9 aa, Artificial Sequence
  Peptide Derived from Human Papillomavirus
AVPDDLYIK

SEQ ID NO: 43189 - protein, 10 aa, Artificial Sequence
  Peptide Derived from Human Papillomavirus
CGSTCKYPDY

SEQ ID NO: 43190 - protein, 11 aa, Artificial Sequence
  Peptide Derived from Human Papillomavirus
CMDFKTLQANK

SEQ ID NO: 43191 - protein, 10 aa, Artificial Sequence
  Peptide Derived from Human Papillomavirus
CTQVTSDSTY

SEQ ID NO: 43192 - protein, 11 aa, Artificial Sequence
  Peptide Derived from Human Papillomavirus
CTQVTSDSTYK

SEQ ID NO: 43193 - protein, 8 aa, Artificial Sequence
  Peptide Derived from Human Papillomavirus
CVGLEIGR

SEQ ID NO: 43194 - protein, 8 aa, Artificial Sequence
  Peptide Derived from Human Papillomavirus
DDTETGNK

SEQ ID NO: 43195 - protein, 9 aa, Artificial Sequence
  Peptide Derived from Human Papillomavirus
DDTETGNKY

SEQ ID NO: 43196 - protein, 9 aa, Artificial Sequence
  Peptide Derived from Human Papillomavirus
DFKTLQANK

SEQ ID NO: 43197 - protein, 8 aa, Artificial Sequence
  Peptide Derived from Human Papillomavirus
DICGSTCK

SEQ ID NO: 43198 - protein, 9 aa, Artificial Sequence
  Peptide Derived from Human Papillomavirus
DICGSTCKY

SEQ ID NO: 43199 - protein, 9 aa, Artificial Sequence
  Peptide Derived from Human Papillomavirus
DLDQFPLGR

SEQ ID NO: 43200 - protein, 10 aa, Artificial Sequence
  Peptide Derived from Human Papillomavirus
DLDQFPLGRK

SEQ ID NO: 43201 - protein, 10 aa, Artificial Sequence
  Peptide Derived from Human Papillomavirus
DLQFVFQLCK

SEQ ID NO: 43202 - protein, 10 aa, Artificial Sequence
  Peptide Derived from Human Papillomavirus
DNRECLSMDY

SEQ ID NO: 43203 - protein, 11 aa, Artificial Sequence
  Peptide Derived from Human Papillomavirus
DNRECLSMDYK

SEQ ID NO: 43204 - protein, 8 aa, Artificial Sequence
  Peptide Derived from Human Papillomavirus
DSLFFFLR

SEQ ID NO: 43205 - protein, 9 aa, Artificial Sequence
  Peptide Derived from Human Papillomavirus
DSLFFFLRR

SEQ ID NO: 43206 - protein, 10 aa, Artificial Sequence
  Peptide Derived from Human Papillomavirus
DSTYKNENFK

SEQ ID NO: 43207 - protein, 8 aa, Artificial Sequence
  Peptide Derived from Human Papillomavirus
DTETGNKY

SEQ ID NO: 43208 - protein, 10 aa, Artificial Sequence
  Peptide Derived from Human Papillomavirus
DTGFGCMDFK

SEQ ID NO: 43209 - protein, 11 aa, Artificial Sequence
  Peptide Derived from Human Papillomavirus
DTSFYNPDTQR

SEQ ID NO: 43210 - protein, 8 aa, Artificial Sequence
  Peptide Derived from Human Papillomavirus
EAVPDDLY

SEQ ID NO: 43211 - protein, 10 aa, Artificial Sequence
  Peptide Derived from Human Papillomavirus
EAVPDDLYIK

SEQ ID NO: 43212 - protein, 8 aa, Artificial Sequence
  Peptide Derived from Human Papillomavirus
ECLSMDYK

SEQ ID NO: 43213 - protein, 8 aa, Artificial Sequence
  Peptide Derived from Human Papillomavirus
ENFKEYIR

SEQ ID NO: 43214 - protein, 9 aa, Artificial Sequence
  Peptide Derived from Human Papillomavirus
ENFKEYIRH

SEQ ID NO: 43215 - protein, 9 aa, Artificial Sequence
  Peptide Derived from Human Papillomavirus
ESQLFNKPY

SEQ ID NO: 43216 - protein, 9 aa, Artificial Sequence
  Peptide Derived from Human Papillomavirus
FDDTETGNK

SEQ ID NO: 43217 - protein, 10 aa, Artificial Sequence
  Peptide Derived from Human Papillomavirus
FDDTETGNKY

SEQ ID NO: 43218 - protein, 11 aa, Artificial Sequence
  Peptide Derived from Human Papillomavirus
FFLRREQMFVR

SEQ ID NO: 43219 - protein, 9 aa, Artificial Sequence
  Peptide Derived from Human Papillomavirus
FGFPDTSFY

SEQ ID NO: 43220 - protein, 8 aa, Artificial Sequence
  Peptide Derived from Human Papillomavirus
FLLQAGLK

SEQ ID NO: 43221 - protein, 10 aa, Artificial Sequence
  Peptide Derived from Human Papillomavirus
FLLQAGLKAK

SEQ ID NO: 43222 - protein, 10 aa, Artificial Sequence
  Peptide Derived from Human Papillomavirus
FLRREQMFVR

SEQ ID NO: 43223 - protein, 11 aa, Artificial Sequence
  Peptide Derived from Human Papillomavirus
FLRREQMFVRH

SEQ ID NO: 43224 - protein, 9 aa, Artificial Sequence
  Peptide Derived from Human Papillomavirus
FNKPYWLQR

SEQ ID NO: 43225 - protein, 10 aa, Artificial Sequence
  Peptide Derived from Human Papillomavirus
FSIKNPTNAK

SEQ ID NO: 43226 - protein, 11 aa, Artificial Sequence
  Peptide Derived from Human Papillomavirus
FSIKNPTNAKK

SEQ ID NO: 43227 - protein, 8 aa, Artificial Sequence
  Peptide Derived from Human Papillomavirus
FVRHFFNR

SEQ ID NO: 43228 - protein, 11 aa, Artificial Sequence
  Peptide Derived from Human Papillomavirus
FVTSQAITCQK

SEQ ID NO: 43229 - protein, 9 aa, Artificial Sequence
  Peptide Derived from Human Papillomavirus
FVTVVDTTR

SEQ ID NO: 43230 - protein, 9 aa, Artificial Sequence
  Peptide Derived from Human Papillomavirus
GCKPPTGEH

SEQ ID NO: 43231 - protein, 9 aa, Artificial Sequence
  Peptide Derived from Human Papillomavirus
GDSLFFFLR

SEQ ID NO: 43232 - protein, 10 aa, Artificial Sequence
  Peptide Derived from Human Papillomavirus
GDSLFFFLRR

SEQ ID NO: 43233 - protein, 8 aa, Artificial Sequence
  Peptide Derived from Human Papillomavirus
GFGCMDFK

SEQ ID NO: 43234 - protein, 8 aa, Artificial Sequence
  Peptide Derived from Human Papillomavirus
GFPDTSFY

SEQ ID NO: 43235 - protein, 10 aa, Artificial Sequence
  Peptide Derived from Human Papillomavirus
GISGHPLLNK

SEQ ID NO: 43236 - protein, 9 aa, Artificial Sequence
  Peptide Derived from Human Papillomavirus
GLKAKPKLK

SEQ ID NO: 43237 - protein, 10 aa, Artificial Sequence
  Peptide Derived from Human Papillomavirus
GLKAKPKLKR

SEQ ID NO: 43238 - protein, 8 aa, Artificial Sequence
  Peptide Derived from Human Papillomavirus
GLQYRVFR

SEQ ID NO: 43239 - protein, 10 aa, Artificial Sequence
  Peptide Derived from Human Papillomavirus
GLQYRVFRVR

SEQ ID NO: 43240 - protein, 10 aa, Artificial Sequence
  Peptide Derived from Human Papillomavirus
GSSRLLAVGH

SEQ ID NO: 43241 - protein, 9 aa, Artificial Sequence
  Peptide Derived from Human Papillomavirus
GSTCKYPDY

SEQ ID NO: 43242 - protein, 11 aa, Artificial Sequence
  Peptide Derived from Human Papillomavirus
GSTCKYPDYLK

SEQ ID NO: 43243 - protein, 8 aa, Artificial Sequence
  Peptide Derived from Human Papillomavirus
ICGSTCKY

SEQ ID NO: 43244 - protein, 11 aa, Artificial Sequence
  Peptide Derived from Human Papillomavirus
ICGSTCKYPDY

SEQ ID NO: 43245 - protein, 9 aa, Artificial Sequence
  Peptide Derived from Human Papillomavirus
IDICGSTCK

SEQ ID NO: 43246 - protein, 10 aa, Artificial Sequence
  Peptide Derived from Human Papillomavirus
IDICGSTCKY

SEQ ID NO: 43247 - protein, 9 aa, Artificial Sequence
  Peptide Derived from Human Papillomavirus
ISGHPLLNK

SEQ ID NO: 43248 - protein, 10 aa, Artificial Sequence
  Peptide Derived from Human Papillomavirus
ITCQKTVPPK

SEQ ID NO: 43249 - protein, 8 aa, Artificial Sequence
  Peptide Derived from Human Papillomavirus
KAKPKLKR

SEQ ID NO: 43250 - protein, 10 aa, Artificial Sequence
  Peptide Derived from Human Papillomavirus
KFDDTETGNK

SEQ ID NO: 43251 - protein, 11 aa, Artificial Sequence
  Peptide Derived from Human Papillomavirus
KFDDTETGNKY

SEQ ID NO: 43252 - protein, 10 aa, Artificial Sequence
  Peptide Derived from Human Papillomavirus
KFGFPDTSFY

SEQ ID NO: 43253 - protein, 9 aa, Artificial Sequence
  Peptide Derived from Human Papillomavirus
KFLLQAGLK

SEQ ID NO: 43254 - protein, 11 aa, Artificial Sequence
  Peptide Derived from Human Papillomavirus
KFLLQAGLKAK

SEQ ID NO: 43255 - protein, 11 aa, Artificial Sequence
  Peptide Derived from Human Papillomavirus
KLKRAAPTSTR

SEQ ID NO: 43256 - protein, 8 aa, Artificial Sequence
  Peptide Derived from Human Papillomavirus
KNENFKEY

SEQ ID NO: 43257 - protein, 10 aa, Artificial Sequence
  Peptide Derived from Human Papillomavirus
KNENFKEYIR

SEQ ID NO: 43258 - protein, 11 aa, Artificial Sequence
  Peptide Derived from Human Papillomavirus
KNENFKEYIRH

SEQ ID NO: 43259 - protein, 8 aa, Artificial Sequence
  Peptide Derived from Human Papillomavirus
KNPTNAKK

SEQ ID NO: 43260 - protein, 8 aa, Artificial Sequence
  Peptide Derived from Human Papillomavirus
KTVPPKEK

SEQ ID NO: 43261 - protein, 8 aa, Artificial Sequence
  Peptide Derived from Human Papillomavirus
KVSGLQYR

SEQ ID NO: 43262 - protein, 11 aa, Artificial Sequence
  Peptide Derived from Human Papillomavirus
KVSGLQYRVFR

SEQ ID NO: 43263 - protein, 11 aa, Artificial Sequence
  Peptide Derived from Human Papillomavirus
KVTLTAEVMTY

SEQ ID NO: 43264 - protein, 8 aa, Artificial Sequence
  Peptide Derived from Human Papillomavirus
KVVSTDEY

SEQ ID NO: 43265 - protein, 11 aa, Artificial Sequence
  Peptide Derived from Human Papillomavirus
KVVSTDEYVSR

SEQ ID NO: 43266 - protein, 11 aa, Artificial Sequence
  Peptide Derived from Human Papillomavirus
LAVGHPYFSIK

SEQ ID NO: 43267 - protein, 11 aa, Artificial Sequence
  Peptide Derived from Human Papillomavirus
LCTQVTSDSTY

SEQ ID NO: 43268 - protein, 8 aa, Artificial Sequence
  Peptide Derived from Human Papillomavirus
LDQFPLGR

SEQ ID NO: 43269 - protein, 9 aa, Artificial Sequence
  Peptide Derived from Human Papillomavirus
LDQFPLGRK

SEQ ID NO: 43270 - protein, 10 aa, Artificial Sequence
  Peptide Derived from Human Papillomavirus
LFNKPYWLQR

SEQ ID NO: 43271 - protein, 10 aa, Artificial Sequence
  Peptide Derived from Human Papillomavirus
LGCKPPTGEH

SEQ ID NO: 43272 - protein, 10 aa, Artificial Sequence
  Peptide Derived from Human Papillomavirus
LGEAVPDDLY

SEQ ID NO: 43273 - protein, 8 aa, Artificial Sequence
  Peptide Derived from Human Papillomavirus
LGVGISGH

SEQ ID NO: 43274 - protein, 8 aa, Artificial Sequence
  Peptide Derived from Human Papillomavirus
LLAVGHPY

SEQ ID NO: 43275 - protein, 11 aa, Artificial Sequence
  Peptide Derived from Human Papillomavirus
LLGCKPPTGEH

SEQ ID NO: 43276 - protein, 9 aa, Artificial Sequence
  Peptide Derived from Human Papillomavirus
LLQAGLKAK

SEQ ID NO: 43277 - protein, 11 aa, Artificial Sequence
  Peptide Derived from Human Papillomavirus
LLQAGLKAKPK

SEQ ID NO: 43278 - protein, 11 aa, Artificial Sequence
  Peptide Derived from Human Papillomavirus
LLVPKVSGLQY

SEQ ID NO: 43279 - protein, 8 aa, Artificial Sequence
  Peptide Derived from Human Papillomavirus
LTAEVMTY

SEQ ID NO: 43280 - protein, 10 aa, Artificial Sequence
  Peptide Derived from Human Papillomavirus
LTAEVMTYIH

SEQ ID NO: 43281 - protein, 10 aa, Artificial Sequence
  Peptide Derived from Human Papillomavirus
LVPKVSGLQY

SEQ ID NO: 43282 - protein, 11 aa, Artificial Sequence
  Peptide Derived from Human Papillomavirus
LVPKVSGLQYR

SEQ ID NO: 43283 - protein, 10 aa, Artificial Sequence
  Peptide Derived from Human Papillomavirus
MDFKTLQANK

SEQ ID NO: 43284 - protein, 9 aa, Artificial Sequence
  Peptide Derived from Human Papillomavirus
MFVRHFFNR

SEQ ID NO: 43285 - protein, 11 aa, Artificial Sequence
  Peptide Derived from Human Papillomavirus
MVTSESQLFNK

SEQ ID NO: 43286 - protein, 9 aa, Artificial Sequence
  Peptide Derived from Human Papillomavirus
NAKKLLVPK

SEQ ID NO: 43287 - protein, 8 aa, Artificial Sequence
  Peptide Derived from Human Papillomavirus
NFKEYIRH

SEQ ID NO: 43288 - protein, 11 aa, Artificial Sequence
  Peptide Derived from Human Papillomavirus
PDYLKMTSEPY

SEQ ID NO: 43289 - protein, 9 aa, Artificial Sequence
  Peptide Derived from Human Papillomavirus
PGQPGADNR

SEQ ID NO: 43290 - protein, 10 aa, Artificial Sequence
  Peptide Derived from Human Papillomavirus
PIDICGSTCK

SEQ ID NO: 43291 - protein, 11 aa, Artificial Sequence
  Peptide Derived from Human Papillomavirus
PIDICGSTCKY

SEQ ID NO: 43292 - protein, 9 aa, Artificial Sequence
  Peptide Derived from Human Papillomavirus
PLGVGISGH

SEQ ID NO: 43293 - protein, 9 aa, Artificial Sequence
  Peptide Derived from Human Papillomavirus
PSASLQDTY

SEQ ID NO: 43294 - protein, 10 aa, Artificial Sequence
  Peptide Derived from Human Papillomavirus
PSASLQDTYR

SEQ ID NO: 43295 - protein, 8 aa, Artificial Sequence
  Peptide Derived from Human Papillomavirus
PTGEHWGK

SEQ ID NO: 43296 - protein, 11 aa, Artificial Sequence
  Peptide Derived from Human Papillomavirus
PTNAKKLLVPK

SEQ ID NO: 43297 - protein, 10 aa, Artificial Sequence
  Peptide Derived from Human Papillomavirus
PTSTRTSSAK

SEQ ID NO: 43298 - protein, 11 aa, Artificial Sequence
  Peptide Derived from Human Papillomavirus
PTSTRTSSAKR

SEQ ID NO: 43299 - protein, 11 aa, Artificial Sequence
  Peptide Derived from Human Papillomavirus
PVSKVVSTDEY

SEQ ID NO: 43300 - protein, 9 aa, Artificial Sequence
  Peptide Derived from Human Papillomavirus
QAGLKAKPK

SEQ ID NO: 43301 - protein, 11 aa, Artificial Sequence
  Peptide Derived from Human Papillomavirus
QAGLKAKPKLK

SEQ ID NO: 43302 - protein, 8 aa, Artificial Sequence
  Peptide Derived from Human Papillomavirus
QFVFQLCK

SEQ ID NO: 43303 - protein, 8 aa, Artificial Sequence
  Peptide Derived from Human Papillomavirus
QLCLLGCK

SEQ ID NO: 43304 - protein, 11 aa, Artificial Sequence
  Peptide Derived from Human Papillomavirus
QLFNKPYWLQR

SEQ ID NO: 43305 - protein, 10 aa, Artificial Sequence
  Peptide Derived from Human Papillomavirus
QMFVRHFFNR

SEQ ID NO: 43306 - protein, 10 aa, Artificial Sequence
  Peptide Derived from Human Papillomavirus
QTQLCLLGCK

SEQ ID NO: 43307 - protein, 11 aa, Artificial Sequence
  Peptide Derived from Human Papillomavirus
QVFVTVVDTTR

SEQ ID NO: 43308 - protein, 8 aa, Artificial Sequence
  Peptide Derived from Human Papillomavirus
QVTSDSTY

SEQ ID NO: 43309 - protein, 9 aa, Artificial Sequence
  Peptide Derived from Human Papillomavirus
QVTSDSTYK

SEQ ID NO: 43310 - protein, 8 aa, Artificial Sequence
  Peptide Derived from Human Papillomavirus
RAAPTSTR

SEQ ID NO: 43311 - protein, 9 aa, Artificial Sequence
  Peptide Derived from Human Papillomavirus
RLLAVGHPY

SEQ ID NO: 43312 - protein, 8 aa, Artificial Sequence
  Peptide Derived from Human Papillomavirus
RTSSAKRK

SEQ ID NO: 43313 - protein, 9 aa, Artificial Sequence
  Peptide Derived from Human Papillomavirus
RTSSAKRKK

SEQ ID NO: 43314 - protein, 11 aa, Artificial Sequence
  Peptide Derived from Human Papillomavirus
RTSSAKRKKVK

SEQ ID NO: 43315 - protein, 9 aa, Artificial Sequence
  Peptide Derived from Human Papillomavirus
RVRLPDPNK

SEQ ID NO: 43316 - protein, 11 aa, Artificial Sequence
  Peptide Derived from Human Papillomavirus
SADLDQFPLGR

SEQ ID NO: 43317 - protein, 8 aa, Artificial Sequence
  Peptide Derived from Human Papillomavirus
SAKRKKVK

SEQ ID NO: 43318 - protein, 9 aa, Artificial Sequence
  Peptide Derived from Human Papillomavirus
SAKRKKVKK

SEQ ID NO: 43319 - protein, 8 aa, Artificial Sequence
  Peptide Derived from Human Papillomavirus
SASLQDTY

SEQ ID NO: 43320 - protein, 9 aa, Artificial Sequence
  Peptide Derived from Human Papillomavirus
SASLQDTYR

SEQ ID NO: 43321 - protein, 11 aa, Artificial Sequence
  Peptide Derived from Human Papillomavirus
SDSTYKNENFK

SEQ ID NO: 43322 - protein, 9 aa, Artificial Sequence
  Peptide Derived from Human Papillomavirus
SFYNPDTQR

SEQ ID NO: 43323 - protein, 8 aa, Artificial Sequence
  Peptide Derived from Human Papillomavirus
SGHPLLNK

SEQ ID NO: 43324 - protein, 9 aa, Artificial Sequence
  Peptide Derived from Human Papillomavirus
SGLQYRVFR

SEQ ID NO: 43325 - protein, 11 aa, Artificial Sequence
  Peptide Derived from Human Papillomavirus
SGLQYRVFRVR

SEQ ID NO: 43326 - protein, 9 aa, Artificial Sequence
  Peptide Derived from Human Papillomavirus
SIKNPTNAK

SEQ ID NO: 43327 - protein, 10 aa, Artificial Sequence
  Peptide Derived from Human Papillomavirus
SIKNPTNAKK

SEQ ID NO: 43328 - protein, 10 aa, Artificial Sequence
  Peptide Derived from Human Papillomavirus
SIYYYAGSSR

SEQ ID NO: 43329 - protein, 8 aa, Artificial Sequence
  Peptide Derived from Human Papillomavirus
SLFFFLRR

SEQ ID NO: 43330 - protein, 9 aa, Artificial Sequence
  Peptide Derived from Human Papillomavirus
SSAKRKKVK

SEQ ID NO: 43331 - protein, 10 aa, Artificial Sequence
  Peptide Derived from Human Papillomavirus
SSAKRKKVKK

SEQ ID NO: 43332 - protein, 9 aa, Artificial Sequence
  Peptide Derived from Human Papillomavirus
SSRLLAVGH

SEQ ID NO: 43333 - protein, 11 aa, Artificial Sequence
  Peptide Derived from Human Papillomavirus
SSRLLAVGHPY

SEQ ID NO: 43334 - protein, 8 aa, Artificial Sequence
  Peptide Derived from Human Papillomavirus
STCKYPDY

SEQ ID NO: 43335 - protein, 10 aa, Artificial Sequence
  Peptide Derived from Human Papillomavirus
STCKYPDYLK

SEQ ID NO: 43336 - protein, 8 aa, Artificial Sequence
  Peptide Derived from Human Papillomavirus
STDEYVSR

SEQ ID NO: 43337 - protein, 8 aa, Artificial Sequence
  Peptide Derived from Human Papillomavirus
STRTSSAK

SEQ ID NO: 43338 - protein, 9 aa, Artificial Sequence
  Peptide Derived from Human Papillomavirus
STRTSSAKR

SEQ ID NO: 43339 - protein, 10 aa, Artificial Sequence
  Peptide Derived from Human Papillomavirus
STRTSSAKRK

SEQ ID NO: 43340 - protein, 11 aa, Artificial Sequence
  Peptide Derived from Human Papillomavirus
STRTSSAKRKK

SEQ ID NO: 43341 - protein, 9 aa, Artificial Sequence
  Peptide Derived from Human Papillomavirus
STYKNENFK

SEQ ID NO: 43342 - protein, 11 aa, Artificial Sequence
  Peptide Derived from Human Papillomavirus
STYKNENFKEY

SEQ ID NO: 43343 - protein, 11 aa, Artificial Sequence
  Peptide Derived from Human Papillomavirus
SVWRPSEATVY

SEQ ID NO: 43344 - protein, 9 aa, Artificial Sequence
  Peptide Derived from Human Papillomavirus
TAEVMTYIH

SEQ ID NO: 43345 - protein, 9 aa, Artificial Sequence
  Peptide Derived from Human Papillomavirus
TCKYPDYLK

SEQ ID NO: 43346 - protein, 9 aa, Artificial Sequence
  Peptide Derived from Human Papillomavirus
TCQKTVPPK

SEQ ID NO: 43347 - protein, 11 aa, Artificial Sequence
  Peptide Derived from Human Papillomavirus
TCQKTVPPKEK

SEQ ID NO: 43348 - protein, 11 aa, Artificial Sequence
  Peptide Derived from Human Papillomavirus
TDEYVSRTSIY

SEQ ID NO: 43349 - protein, 8 aa, Artificial Sequence
  Peptide Derived from Human Papillomavirus
TFWEVDLK

SEQ ID NO: 43350 - protein, 10 aa, Artificial Sequence
  Peptide Derived from Human Papillomavirus
TFWEVDLKEK

SEQ ID NO: 43351 - protein, 9 aa, Artificial Sequence
  Peptide Derived from Human Papillomavirus
TGFGCMDFK

SEQ ID NO: 43352 - protein, 11 aa, Artificial Sequence
  Peptide Derived from Human Papillomavirus
TLGEAVPDDLY

SEQ ID NO: 43353 - protein, 9 aa, Artificial Sequence
  Peptide Derived from Human Papillomavirus
TLTAEVMTY

SEQ ID NO: 43354 - protein, 11 aa, Artificial Sequence
  Peptide Derived from Human Papillomavirus
TLTAEVMTYIH

SEQ ID NO: 43355 - protein, 10 aa, Artificial Sequence
  Peptide Derived from Human Papillomavirus
TNAKKLLVPK

SEQ ID NO: 43356 - protein, 9 aa, Artificial Sequence
  Peptide Derived from Human Papillomavirus
TSESQLFNK

SEQ ID NO: 43357 - protein, 11 aa, Artificial Sequence
  Peptide Derived from Human Papillomavirus
TSESQLFNKPY

SEQ ID NO: 43358 - protein, 10 aa, Artificial Sequence
  Peptide Derived from Human Papillomavirus
TSFYNPDTQR

SEQ ID NO: 43359 - protein, 11 aa, Artificial Sequence
  Peptide Derived from Human Papillomavirus
TSIYYYAGSSR

SEQ ID NO: 43360 - protein, 9 aa, Artificial Sequence
  Peptide Derived from Human Papillomavirus
TSQAITCQK

SEQ ID NO: 43361 - protein, 8 aa, Artificial Sequence
  Peptide Derived from Human Papillomavirus
TSSAKRKK

SEQ ID NO: 43362 - protein, 10 aa, Artificial Sequence
  Peptide Derived from Human Papillomavirus
TSSAKRKKVK

SEQ ID NO: 43363 - protein, 11 aa, Artificial Sequence
  Peptide Derived from Human Papillomavirus
TSSAKRKKVKK

SEQ ID NO: 43364 - protein, 9 aa, Artificial Sequence
  Peptide Derived from Human Papillomavirus
TSTRTSSAK

SEQ ID NO: 43365 - protein, 10 aa, Artificial Sequence
  Peptide Derived from Human Papillomavirus
TSTRTSSAKR

SEQ ID NO: 43366 - protein, 11 aa, Artificial Sequence
  Peptide Derived from Human Papillomavirus
TSTRTSSAKRK

SEQ ID NO: 43367 - protein, 11 aa, Artificial Sequence
  Peptide Derived from Human Papillomavirus
TVYLPPVPVSK

SEQ ID NO: 43368 - protein, 11 aa, Artificial Sequence
  Peptide Derived from Human Papillomavirus
VDTGFGCMDFK

SEQ ID NO: 43369 - protein, 11 aa, Artificial Sequence
  Peptide Derived from Human Papillomavirus
VFRVRLPDPNK

SEQ ID NO: 43370 - protein, 10 aa, Artificial Sequence
  Peptide Derived from Human Papillomavirus
VFVTVVDTTR

SEQ ID NO: 43371 - protein, 9 aa, Artificial Sequence
  Peptide Derived from Human Papillomavirus
VGHPYFSIK

SEQ ID NO: 43372 - protein, 11 aa, Artificial Sequence
  Peptide Derived from Human Papillomavirus
VGISGHPLLNK

SEQ ID NO: 43373 - protein, 10 aa, Artificial Sequence
  Peptide Derived from Human Papillomavirus
VSGLQYRVFR

SEQ ID NO: 43374 - protein, 10 aa, Artificial Sequence
  Peptide Derived from Human Papillomavirus
VSKVVSTDEY

SEQ ID NO: 43375 - protein, 8 aa, Artificial Sequence
  Peptide Derived from Human Papillomavirus
VSRTSIYY

SEQ ID NO: 43376 - protein, 9 aa, Artificial Sequence
  Peptide Derived from Human Papillomavirus
VSRTSIYYY

SEQ ID NO: 43377 - protein, 9 aa, Artificial Sequence
  Peptide Derived from Human Papillomavirus
VSTDEYVSR

SEQ ID NO: 43378 - protein, 10 aa, Artificial Sequence
  Peptide Derived from Human Papillomavirus
VTLTAEVMTY

SEQ ID NO: 43379 - protein, 8 aa, Artificial Sequence
  Peptide Derived from Human Papillomavirus
VTSDSTYK

SEQ ID NO: 43380 - protein, 10 aa, Artificial Sequence
  Peptide Derived from Human Papillomavirus
VTSESQLFNK

SEQ ID NO: 43381 - protein, 10 aa, Artificial Sequence
  Peptide Derived from Human Papillomavirus
VTSQAITCQK

SEQ ID NO: 43382 - protein, 8 aa, Artificial Sequence
  Peptide Derived from Human Papillomavirus
VTVVDTTR

SEQ ID NO: 43383 - protein, 10 aa, Artificial Sequence
  Peptide Derived from Human Papillomavirus
VVSTDEYVSR

SEQ ID NO: 43384 - protein, 10 aa, Artificial Sequence
  Peptide Derived from Human Papillomavirus
WACVGLEIGR

SEQ ID NO: 43385 - protein, 8 aa, Artificial Sequence
  Peptide Derived from Human Papillomavirus
WLQRAQGH

SEQ ID NO: 43386 - protein, 11 aa, Artificial Sequence
  Peptide Derived from Human Papillomavirus
YDLQFVFQLCK

SEQ ID NO: 43387 - protein, 11 aa, Artificial Sequence
  Peptide Derived from Human Papillomavirus
YFSIKNPTNAK

SEQ ID NO: 43388 - protein, 10 aa, Artificial Sequence
  Peptide Derived from Human Papillomavirus
YGDSLFFFLR

SEQ ID NO: 43389 - protein, 11 aa, Artificial Sequence
  Peptide Derived from Human Papillomavirus
YGDSLFFFLRR

SEQ ID NO: 43390 - protein, 8 aa, Artificial Sequence
  Peptide Derived from Human Papillomavirus
YIRHVEEY

SEQ ID NO: 43391 - protein, 9 aa, Artificial Sequence
  Peptide Derived from Human Papillomavirus
YLKMTSEPY

SEQ ID NO: 43392 - protein, 9 aa, Artificial Sequence
  Peptide Derived from Human Papillomavirus
YLPPVPVSK

SEQ ID NO: 43393 - protein, 9 aa, Artificial Sequence
  Peptide Derived from Human Papillomavirus
YTFWEVDLK

SEQ ID NO: 43394 - protein, 11 aa, Artificial Sequence
  Peptide Derived from Human Papillomavirus
YTFWEVDLKEK

SEQ ID NO: 43395 - protein, 8 aa, Artificial Sequence
  Peptide Derived from Human Papillomavirus
YVSRTSIY

SEQ ID NO: 43396 - protein, 9 aa, Artificial Sequence
  Peptide Derived from Human Papillomavirus
YVSRTSIYY

SEQ ID NO: 43397 - protein, 10 aa, Artificial Sequence
  Peptide Derived from Human Papillomavirus
YVSRTSIYYY

SEQ ID NO: 43398 - protein, 9 aa, Artificial Sequence
  Peptide Derived from Human Papillomavirus
AAIPLQPIR

SEQ ID NO: 43399 - protein, 8 aa, Artificial Sequence
  Peptide Derived from Human Papillomavirus
ADDVDNVH

SEQ ID NO: 43400 - protein, 9 aa, Artificial Sequence
  Peptide Derived from Human Papillomavirus
ADFVLHPSY

SEQ ID NO: 43401 - protein, 8 aa, Artificial Sequence
  Peptide Derived from Human Papillomavirus
AFLTSPHK

SEQ ID NO: 43402 - protein, 8 aa, Artificial Sequence
  Peptide Derived from Human Papillomavirus
AIPLQPIR

SEQ ID NO: 43403 - protein, 10 aa, Artificial Sequence
  Peptide Derived from Human Papillomavirus
AITSRRHTVR

SEQ ID NO: 43404 - protein, 10 aa, Artificial Sequence
  Peptide Derived from Human Papillomavirus
ALHRPAITSR

SEQ ID NO: 43405 - protein, 11 aa, Artificial Sequence
  Peptide Derived from Human Papillomavirus
ALHRPAITSRR

SEQ ID NO: 43406 - protein, 11 aa, Artificial Sequence
  Peptide Derived from Human Papillomavirus
ASATQLYQTCK

SEQ ID NO: 43407 - protein, 9 aa, Artificial Sequence
  Peptide Derived from Human Papillomavirus
ATLKTRSGK

SEQ ID NO: 43408 - protein, 9 aa, Artificial Sequence
  Peptide Derived from Human Papillomavirus
ATQLYQTCK

SEQ ID NO: 43409 - protein, 9 aa, Artificial Sequence
  Peptide Derived from Human Papillomavirus
DFLDIIALH

SEQ ID NO: 43410 - protein, 10 aa, Artificial Sequence
  Peptide Derived from Human Papillomavirus
DFLDIIALHR

SEQ ID NO: 43411 - protein, 8 aa, Artificial Sequence
  Peptide Derived from Human Papillomavirus
DFVLHPSY

SEQ ID NO: 43412 - protein, 8 aa, Artificial Sequence
  Peptide Derived from Human Papillomavirus
DGADFVLH

SEQ ID NO: 43413 - protein, 11 aa, Artificial Sequence
  Peptide Derived from Human Papillomavirus
DGADFVLHPSY

SEQ ID NO: 43414 - protein, 10 aa, Artificial Sequence
  Peptide Derived from Human Papillomavirus
DLSPIVPLDH

SEQ ID NO: 43415 - protein, 9 aa, Artificial Sequence
  Peptide Derived from Human Papillomavirus
DNVHTPMQH

SEQ ID NO: 43416 - protein, 11 aa, Artificial Sequence
  Peptide Derived from Human Papillomavirus
DNVHTPMQHSY

SEQ ID NO: 43417 - protein, 11 aa, Artificial Sequence
  Peptide Derived from Human Papillomavirus
DVDNVHTPMQH

SEQ ID NO: 43418 - protein, 11 aa, Artificial Sequence
  Peptide Derived from Human Papillomavirus
DVYADDVDNVH

SEQ ID NO: 43419 - protein, 8 aa, Artificial Sequence
  Peptide Derived from Human Papillomavirus
EDTLQFQH

SEQ ID NO: 43420 - protein, 11 aa, Artificial Sequence
  Peptide Derived from Human Papillomavirus
EGSTIADQILK

SEQ ID NO: 43421 - protein, 10 aa, Artificial Sequence
  Peptide Derived from Human Papillomavirus
ESSIQTISTH

SEQ ID NO: 43422 - protein, 11 aa, Artificial Sequence
  Peptide Derived from Human Papillomavirus
FDPEDTLQFQH

SEQ ID NO: 43423 - protein, 8 aa, Artificial Sequence
  Peptide Derived from Human Papillomavirus
FILRRRRK

SEQ ID NO: 43424 - protein, 9 aa, Artificial Sequence
  Peptide Derived from Human Papillomavirus
FILRRRRKR

SEQ ID NO: 43425 - protein, 8 aa, Artificial Sequence
  Peptide Derived from Human Papillomavirus
FLDIIALH

SEQ ID NO: 43426 - protein, 9 aa, Artificial Sequence
  Peptide Derived from Human Papillomavirus
FLDIIALHR

SEQ ID NO: 43427 - protein, 11 aa, Artificial Sequence
  Peptide Derived from Human Papillomavirus
FLTSPHKLITY

SEQ ID NO: 43428 - protein, 11 aa, Artificial Sequence
  Peptide Derived from Human Papillomavirus
FSRVGQKATLK

SEQ ID NO: 43429 - protein, 11 aa, Artificial Sequence
  Peptide Derived from Human Papillomavirus
FSSPTVSTQSY

SEQ ID NO: 43430 - protein, 8 aa, Artificial Sequence
  Peptide Derived from Human Papillomavirus
FTEPSVLH

SEQ ID NO: 43431 - protein, 11 aa, Artificial Sequence
  Peptide Derived from Human Papillomavirus
FVLHPSYFILR

SEQ ID NO: 43432 - protein, 10 aa, Artificial Sequence
  Peptide Derived from Human Papillomavirus
GADFVLHPSY

SEQ ID NO: 43433 - protein, 11 aa, Artificial Sequence
  Peptide Derived from Human Papillomavirus
GIGTGSGSGGR

SEQ ID NO: 43434 - protein, 11 aa, Artificial Sequence
  Peptide Derived from Human Papillomavirus
GLYSRNTQQVK

SEQ ID NO: 43435 - protein, 8 aa, Artificial Sequence
  Peptide Derived from Human Papillomavirus
GSGGRTGY

SEQ ID NO: 43436 - protein, 10 aa, Artificial Sequence
  Peptide Derived from Human Papillomavirus
GSGSGGRTGY

SEQ ID NO: 43437 - protein, 11 aa, Artificial Sequence
  Peptide Derived from Human Papillomavirus
GSRPVARLGLY

SEQ ID NO: 43438 - protein, 10 aa, Artificial Sequence
  Peptide Derived from Human Papillomavirus
GSTIADQILK

SEQ ID NO: 43439 - protein, 11 aa, Artificial Sequence
  Peptide Derived from Human Papillomavirus
GSTIADQILKY

SEQ ID NO: 43440 - protein, 10 aa, Artificial Sequence
  Peptide Derived from Human Papillomavirus
GTCPPDVIPK

SEQ ID NO: 43441 - protein, 9 aa, Artificial Sequence
  Peptide Derived from Human Papillomavirus
GTGSGSGGR

SEQ ID NO: 43442 - protein, 8 aa, Artificial Sequence
  Peptide Derived from Human Papillomavirus
HDTSTSSY

SEQ ID NO: 43443 - protein, 10 aa, Artificial Sequence
  Peptide Derived from Human Papillomavirus
HSYSTFATTR

SEQ ID NO: 43444 - protein, 8 aa, Artificial Sequence
  Peptide Derived from Human Papillomavirus
HTPMQHSY

SEQ ID NO: 43445 - protein, 8 aa, Artificial Sequence
  Peptide Derived from Human Papillomavirus
HTVPNEQY

SEQ ID NO: 43446 - protein, 11 aa, Artificial Sequence
  Peptide Derived from Human Papillomavirus
HTVRFSRVGQK

SEQ ID NO: 43447 - protein, 8 aa, Artificial Sequence
  Peptide Derived from Human Papillomavirus
IADQILKY

SEQ ID NO: 43448 - protein, 11 aa, Artificial Sequence
  Peptide Derived from Human Papillomavirus
IALHRPAITSR

SEQ ID NO: 43449 - protein, 8 aa, Artificial Sequence
  Peptide Derived from Human Papillomavirus
IGARIHYY

SEQ ID NO: 43450 - protein, 10 aa, Artificial Sequence
  Peptide Derived from Human Papillomavirus
IGTGSGSGGR

SEQ ID NO: 43451 - protein, 8 aa, Artificial Sequence
  Peptide Derived from Human Papillomavirus
ILRRRRKR

SEQ ID NO: 43452 - protein, 11 aa, Artificial Sequence
  Peptide Derived from Human Papillomavirus
ILRRRRKRFPY

SEQ ID NO: 43453 - protein, 9 aa, Artificial Sequence
  Peptide Derived from Human Papillomavirus
INDGLYDVY

SEQ ID NO: 43454 - protein, 9 aa, Artificial Sequence
  Peptide Derived from Human Papillomavirus
ITSRRHTVR

SEQ ID NO: 43455 - protein, 11 aa, Artificial Sequence
  Peptide Derived from Human Papillomavirus
IVVDGADFVLH

SEQ ID NO: 43456 - protein, 10 aa, Artificial Sequence
  Peptide Derived from Human Papillomavirus
KATLKTRSGK

SEQ ID NO: 43457 - protein, 11 aa, Artificial Sequence
  Peptide Derived from Human Papillomavirus
KTRSGKQIGAR

SEQ ID NO: 43458 - protein, 10 aa, Artificial Sequence
  Peptide Derived from Human Papillomavirus
LDHTVPNEQY

SEQ ID NO: 43459 - protein, 8 aa, Artificial Sequence
  Peptide Derived from Human Papillomavirus
LDIIALHR

SEQ ID NO: 43460 - protein, 9 aa, Artificial Sequence
  Peptide Derived from Human Papillomavirus
LSPIVPLDH

SEQ ID NO: 43461 - protein, 10 aa, Artificial Sequence
  Peptide Derived from Human Papillomavirus
LTSPHKLITY

SEQ ID NO: 43462 - protein, 8 aa, Artificial Sequence
  Peptide Derived from Human Papillomavirus
NDGLYDVY

SEQ ID NO: 43463 - protein, 8 aa, Artificial Sequence
  Peptide Derived from Human Papillomavirus
NVHTPMQH

SEQ ID NO: 43464 - protein, 10 aa, Artificial Sequence
  Peptide Derived from Human Papillomavirus
NVHTPMQHSY

SEQ ID NO: 43465 - protein, 8 aa, Artificial Sequence
  Peptide Derived from Human Papillomavirus
PAFLTSPH

SEQ ID NO: 43466 - protein, 9 aa, Artificial Sequence
  Peptide Derived from Human Papillomavirus
PAFLTSPHK

SEQ ID NO: 43467 - protein, 8 aa, Artificial Sequence
  Peptide Derived from Human Papillomavirus
PAITSRRH

SEQ ID NO: 43468 - protein, 11 aa, Artificial Sequence
  Peptide Derived from Human Papillomavirus
PAITSRRHTVR

SEQ ID NO: 43469 - protein, 9 aa, Artificial Sequence
  Peptide Derived from Human Papillomavirus
PAPAEASGH

SEQ ID NO: 43470 - protein, 10 aa, Artificial Sequence
  Peptide Derived from Human Papillomavirus
PDFLDIIALH

SEQ ID NO: 43471 - protein, 11 aa, Artificial Sequence
  Peptide Derived from Human Papillomavirus
PDFLDIIALHR

SEQ ID NO: 43472 - protein, 8 aa, Artificial Sequence
  Peptide Derived from Human Papillomavirus
PGSRPVAR

SEQ ID NO: 43473 - protein, 10 aa, Artificial Sequence
  Peptide Derived from Human Papillomavirus
PIPGSRPVAR

SEQ ID NO: 43474 - protein, 11 aa, Artificial Sequence
  Peptide Derived from Human Papillomavirus
PLDHTVPNEQY

SEQ ID NO: 43475 - protein, 10 aa, Artificial Sequence
  Peptide Derived from Human Papillomavirus
PLHDTSTSSY

SEQ ID NO: 43476 - protein, 11 aa, Artificial Sequence
  Peptide Derived from Human Papillomavirus
PNEQYELQPLH

SEQ ID NO: 43477 - protein, 8 aa, Artificial Sequence
  Peptide Derived from Human Papillomavirus
PSYFILRR

SEQ ID NO: 43478 - protein, 9 aa, Artificial Sequence
  Peptide Derived from Human Papillomavirus
PSYFILRRR

SEQ ID NO: 43479 - protein, 10 aa, Artificial Sequence
  Peptide Derived from Human Papillomavirus
PSYFILRRRR

SEQ ID NO: 43480 - protein, 11 aa, Artificial Sequence
  Peptide Derived from Human Papillomavirus
PSYFILRRRRK

SEQ ID NO: 43481 - protein, 11 aa, Artificial Sequence
  Peptide Derived from Human Papillomavirus
PTAAIPLQPIR

SEQ ID NO: 43482 - protein, 10 aa, Artificial Sequence
  Peptide Derived from Human Papillomavirus
PTFTEPSVLH

SEQ ID NO: 43483 - protein, 8 aa, Artificial Sequence
  Peptide Derived from Human Papillomavirus
PTVSTQSY

SEQ ID NO: 43484 - protein, 8 aa, Artificial Sequence
  Peptide Derived from Human Papillomavirus
PVARLGLY

SEQ ID NO: 43485 - protein, 10 aa, Artificial Sequence
  Peptide Derived from Human Papillomavirus
PVARLGLYSR

SEQ ID NO: 43486 - protein, 11 aa, Artificial Sequence
  Peptide Derived from Human Papillomavirus
QDLSPIVPLDH

SEQ ID NO: 43487 - protein, 8 aa, Artificial Sequence
  Peptide Derived from Human Papillomavirus
QIGARIHY

SEQ ID NO: 43488 - protein, 9 aa, Artificial Sequence
  Peptide Derived from Human Papillomavirus
QIGARIHYY

SEQ ID NO: 43489 - protein, 8 aa, Artificial Sequence
  Peptide Derived from Human Papillomavirus
RASATQLY

SEQ ID NO: 43490 - protein, 10 aa, Artificial Sequence
  Peptide Derived from Human Papillomavirus
RFPYFFTDVR

SEQ ID NO: 43491 - protein, 8 aa, Artificial Sequence
  Peptide Derived from Human Papillomavirus
RFSRVGQK

SEQ ID NO: 43492 - protein, 9 aa, Artificial Sequence
  Peptide Derived from Human Papillomavirus
RSGKQIGAR

SEQ ID NO: 43493 - protein, 11 aa, Artificial Sequence
  Peptide Derived from Human Papillomavirus
RSGKQIGARIH

SEQ ID NO: 43494 - protein, 9 aa, Artificial Sequence
  Peptide Derived from Human Papillomavirus
RVGQKATLK

SEQ ID NO: 43495 - protein, 11 aa, Artificial Sequence
  Peptide Derived from Human Papillomavirus
RVGQKATLKTR

SEQ ID NO: 43496 - protein, 10 aa, Artificial Sequence
  Peptide Derived from Human Papillomavirus
SATQLYQTCK

SEQ ID NO: 43497 - protein, 8 aa, Artificial Sequence
  Peptide Derived from Human Papillomavirus
SGKQIGAR

SEQ ID NO: 43498 - protein, 10 aa, Artificial Sequence
  Peptide Derived from Human Papillomavirus
SGKQIGARIH

SEQ ID NO: 43499 - protein, 11 aa, Artificial Sequence
  Peptide Derived from Human Papillomavirus
SGKQIGARIHY

SEQ ID NO: 43500 - protein, 9 aa, Artificial Sequence
  Peptide Derived from Human Papillomavirus
SGSGGRTGY

SEQ ID NO: 43501 - protein, 10 aa, Artificial Sequence
  Peptide Derived from Human Papillomavirus
SINDGLYDVY

SEQ ID NO: 43502 - protein, 8 aa, Artificial Sequence
  Peptide Derived from Human Papillomavirus
SIQTISTH

SEQ ID NO: 43503 - protein, 9 aa, Artificial Sequence
  Peptide Derived from Human Papillomavirus
SSIQTISTH

SEQ ID NO: 43504 - protein, 10 aa, Artificial Sequence
  Peptide Derived from Human Papillomavirus
SSPTVSTQSY

SEQ ID NO: 43505 - protein, 9 aa, Artificial Sequence
  Peptide Derived from Human Papillomavirus
SSTPIPGSR

SEQ ID NO: 43506 - protein, 10 aa, Artificial Sequence
  Peptide Derived from Human Papillomavirus
SSYSINDGLY

SEQ ID NO: 43507 - protein, 9 aa, Artificial Sequence
  Peptide Derived from Human Papillomavirus
STIADQILK

SEQ ID NO: 43508 - protein, 10 aa, Artificial Sequence
  Peptide Derived from Human Papillomavirus
STIADQILKY

SEQ ID NO: 43509 - protein, 8 aa, Artificial Sequence
  Peptide Derived from Human Papillomavirus
STPIPGSR

SEQ ID NO: 43510 - protein, 10 aa, Artificial Sequence
  Peptide Derived from Human Papillomavirus
TAAIPLQPIR

SEQ ID NO: 43511 - protein, 9 aa, Artificial Sequence
  Peptide Derived from Human Papillomavirus
TCPPDVIPK

SEQ ID NO: 43512 - protein, 9 aa, Artificial Sequence
  Peptide Derived from Human Papillomavirus
TFTEPSVLH

SEQ ID NO: 43513 - protein, 8 aa, Artificial Sequence
  Peptide Derived from Human Papillomavirus
TGSGSGGR

SEQ ID NO: 43514 - protein, 11 aa, Artificial Sequence
  Peptide Derived from Human Papillomavirus
TGSGSGGRTGY

SEQ ID NO: 43515 - protein, 11 aa, Artificial Sequence
  Peptide Derived from Human Papillomavirus
TGTCPPDVIPK

SEQ ID NO: 43516 - protein, 8 aa, Artificial Sequence
  Peptide Derived from Human Papillomavirus
TIADQILK

SEQ ID NO: 43517 - protein, 9 aa, Artificial Sequence
  Peptide Derived from Human Papillomavirus
TIADQILKY

SEQ ID NO: 43518 - protein, 8 aa, Artificial Sequence
  Peptide Derived from Human Papillomavirus
TLKTRSGK

SEQ ID NO: 43519 - protein, 9 aa, Artificial Sequence
  Peptide Derived from Human Papillomavirus
TSPHKLITY

SEQ ID NO: 43520 - protein, 8 aa, Artificial Sequence
  Peptide Derived from Human Papillomavirus
TSRRHTVR

SEQ ID NO: 43521 - protein, 11 aa, Artificial Sequence
  Peptide Derived from Human Papillomavirus
TSRRHTVRFSR

SEQ ID NO: 43522 - protein, 10 aa, Artificial Sequence
  Peptide Derived from Human Papillomavirus
TSSTPIPGSR

SEQ ID NO: 43523 - protein, 11 aa, Artificial Sequence
  Peptide Derived from Human Papillomavirus
TSSYSINDGLY

SEQ ID NO: 43524 - protein, 10 aa, Artificial Sequence
  Peptide Derived from Human Papillomavirus
TVRFSRVGQK

SEQ ID NO: 43525 - protein, 9 aa, Artificial Sequence
  Peptide Derived from Human Papillomavirus
VARLGLYSR

SEQ ID NO: 43526 - protein, 9 aa, Artificial Sequence
  Peptide Derived from Human Papillomavirus
VDGADFVLH

SEQ ID NO: 43527 - protein, 10 aa, Artificial Sequence
  Peptide Derived from Human Papillomavirus
VDNVHTPMQH

SEQ ID NO: 43528 - protein, 10 aa, Artificial Sequence
  Peptide Derived from Human Papillomavirus
VDPAFLTSPH

SEQ ID NO: 43529 - protein, 11 aa, Artificial Sequence
  Peptide Derived from Human Papillomavirus
VDPAFLTSPHK

SEQ ID NO: 43530 - protein, 8 aa, Artificial Sequence
  Peptide Derived from Human Papillomavirus
VGQKATLK

SEQ ID NO: 43531 - protein, 10 aa, Artificial Sequence
  Peptide Derived from Human Papillomavirus
VGQKATLKTR

SEQ ID NO: 43532 - protein, 10 aa, Artificial Sequence
  Peptide Derived from Human Papillomavirus
VLHPSYFILR

SEQ ID NO: 43533 - protein, 11 aa, Artificial Sequence
  Peptide Derived from Human Papillomavirus
VLHPSYFILRR

SEQ ID NO: 43534 - protein, 11 aa, Artificial Sequence
  Peptide Derived from Human Papillomavirus
VTSSTPIPGSR

SEQ ID NO: 43535 - protein, 10 aa, Artificial Sequence
  Peptide Derived from Human Papillomavirus
VVDGADFVLH

SEQ ID NO: 43536 - protein, 11 aa, Artificial Sequence
  Peptide Derived from Human Papillomavirus
VVDPAFLTSPH

SEQ ID NO: 43537 - protein, 9 aa, Artificial Sequence
  Peptide Derived from Human Papillomavirus
YADDVDNVH

SEQ ID NO: 43538 - protein, 8 aa, Artificial Sequence
  Peptide Derived from Human Papillomavirus
YFILRRRR

SEQ ID NO: 43539 - protein, 9 aa, Artificial Sequence
  Peptide Derived from Human Papillomavirus
YFILRRRRK

SEQ ID NO: 43540 - protein, 10 aa, Artificial Sequence
  Peptide Derived from Human Papillomavirus
YFILRRRRKR

SEQ ID NO: 43541 - protein, 8 aa, Artificial Sequence
  Peptide Derived from Human Papillomavirus
YSINDGLY

SEQ ID NO: 43542 - protein, 11 aa, Artificial Sequence
  Peptide Derived from Human Papillomavirus
YSINDGLYDVY

SEQ ID NO: 43543 - protein, 9 aa, Artificial Sequence
  Peptide Derived from Human Papillomavirus
YSRNTQQVK

SEQ ID NO: 43544 - protein, 8 aa, Artificial Sequence
  Peptide Derived from Human Papillomavirus
YSTFATTR

SEQ ID NO: 43545 - protein, 11 aa, Artificial Sequence
  Peptide Derived from Human Papillomavirus
AAFLKSNCQAK

SEQ ID NO: 43546 - protein, 8 aa, Artificial Sequence
  Peptide Derived from Human Papillomavirus
AAMLAVFK

SEQ ID NO: 43547 - protein, 11 aa, Artificial Sequence
  Peptide Derived from Human Papillomavirus
AAMLAVFKDIY

SEQ ID NO: 43548 - protein, 10 aa, Artificial Sequence
  Peptide Derived from Human Papillomavirus
AFLKSNCQAK

SEQ ID NO: 43549 - protein, 11 aa, Artificial Sequence
  Peptide Derived from Human Papillomavirus
AFLKSNCQAKY

SEQ ID NO: 43550 - protein, 11 aa, Artificial Sequence
  Peptide Derived from Human Papillomavirus
AIISFVNSNSH

SEQ ID NO: 43551 - protein, 11 aa, Artificial Sequence
  Peptide Derived from Human Papillomavirus
ALDGNPISIDR

SEQ ID NO: 43552 - protein, 11 aa, Artificial Sequence
  Peptide Derived from Human Papillomavirus
ALKEFLKGTPK

SEQ ID NO: 43553 - protein, 9 aa, Artificial Sequence
  Peptide Derived from Human Papillomavirus
ALLRYKCGK

SEQ ID NO: 43554 - protein, 11 aa, Artificial Sequence
  Peptide Derived from Human Papillomavirus
ALLRYKCGKNR

SEQ ID NO: 43555 - protein, 10 aa, Artificial Sequence
  Peptide Derived from Human Papillomavirus
AMLAVFKDIY

SEQ ID NO: 43556 - protein, 8 aa, Artificial Sequence
  Peptide Derived from Human Papillomavirus
AMLDDATH

SEQ ID NO: 43557 - protein, 8 aa, Artificial Sequence
  Peptide Derived from Human Papillomavirus
ATHTCWTY

SEQ ID NO: 43558 - protein, 8 aa, Artificial Sequence
  Peptide Derived from Human Papillomavirus
AVMCRHYK

SEQ ID NO: 43559 - protein, 9 aa, Artificial Sequence
  Peptide Derived from Human Papillomavirus
AVMCRHYKR

SEQ ID NO: 43560 - protein, 8 aa, Artificial Sequence
  Peptide Derived from Human Papillomavirus
CAVMCRHY

SEQ ID NO: 43561 - protein, 9 aa, Artificial Sequence
  Peptide Derived from Human Papillomavirus
CAVMCRHYK

SEQ ID NO: 43562 - protein, 10 aa, Artificial Sequence
  Peptide Derived from Human Papillomavirus
CAVMCRHYKR

SEQ ID NO: 43563 - protein, 9 aa, Artificial Sequence
  Peptide Derived from Human Papillomavirus
CFFERTWSR

SEQ ID NO: 43564 - protein, 10 aa, Artificial Sequence
  Peptide Derived from Human Papillomavirus
CGKNRLTVAK

SEQ ID NO: 43565 - protein, 8 aa, Artificial Sequence
  Peptide Derived from Human Papillomavirus
CMLIEPPK

SEQ ID NO: 43566 - protein, 10 aa, Artificial Sequence
  Peptide Derived from Human Papillomavirus
CMLIEPPKLR

SEQ ID NO: 43567 - protein, 10 aa, Artificial Sequence
  Peptide Derived from Human Papillomavirus
CNSNAAAFLK

SEQ ID NO: 43568 - protein, 11 aa, Artificial Sequence
  Peptide Derived from Human Papillomavirus
CSKIDEGGDWR

SEQ ID NO: 43569 - protein, 8 aa, Artificial Sequence
  Peptide Derived from Human Papillomavirus
CVTGQNTR

SEQ ID NO: 43570 - protein, 9 aa, Artificial Sequence
  Peptide Derived from Human Papillomavirus
DAQVLHLLK

SEQ ID NO: 43571 - protein, 10 aa, Artificial Sequence
  Peptide Derived from Human Papillomavirus
DAQVLHLLKR

SEQ ID NO: 43572 - protein, 11 aa, Artificial Sequence
  Peptide Derived from Human Papillomavirus
DAQVLHLLKRK

SEQ ID NO: 43573 - protein, 9 aa, Artificial Sequence
  Peptide Derived from Human Papillomavirus
DATHTCWTY

SEQ ID NO: 43574 - protein, 8 aa, Artificial Sequence
  Peptide Derived from Human Papillomavirus
DCAVMCRH

SEQ ID NO: 43575 - protein, 9 aa, Artificial Sequence
  Peptide Derived from Human Papillomavirus
DCAVMCRHY

SEQ ID NO: 43576 - protein, 10 aa, Artificial Sequence
  Peptide Derived from Human Papillomavirus
DCAVMCRHYK

SEQ ID NO: 43577 - protein, 11 aa, Artificial Sequence
  Peptide Derived from Human Papillomavirus
DCAVMCRHYKR

SEQ ID NO: 43578 - protein, 11 aa, Artificial Sequence
  Peptide Derived from Human Papillomavirus
DCNSNAAAFLK

SEQ ID NO: 43579 - protein, 10 aa, Artificial Sequence
  Peptide Derived from Human Papillomavirus
DDATHTCWTY

SEQ ID NO: 43580 - protein, 9 aa, Artificial Sequence
  Peptide Derived from Human Papillomavirus
DGNPISIDR

SEQ ID NO: 43581 - protein, 10 aa, Artificial Sequence
  Peptide Derived from Human Papillomavirus
DGNPISIDRK

SEQ ID NO: 43582 - protein, 11 aa, Artificial Sequence
  Peptide Derived from Human Papillomavirus
DGNPISIDRKH

SEQ ID NO: 43583 - protein, 10 aa, Artificial Sequence
  Peptide Derived from Human Papillomavirus
DLVRNFKSDK

SEQ ID NO: 43584 - protein, 9 aa, Artificial Sequence
  Peptide Derived from Human Papillomavirus
DNAENVDPH

SEQ ID NO: 43585 - protein, 10 aa, Artificial Sequence
  Peptide Derived from Human Papillomavirus
DNKWPYLESR

SEQ ID NO: 43586 - protein, 11 aa, Artificial Sequence
  Peptide Derived from Human Papillomavirus
DTEGIPFGTFK

SEQ ID NO: 43587 - protein, 8 aa, Artificial Sequence
  Peptide Derived from Human Papillomavirus
DTPEWIQR

SEQ ID NO: 43588 - protein, 10 aa, Artificial Sequence
  Peptide Derived from Human Papillomavirus
EFISFLRALK

SEQ ID NO: 43589 - protein, 8 aa, Artificial Sequence
  Peptide Derived from Human Papillomavirus
EFLKGTPK

SEQ ID NO: 43590 - protein, 9 aa, Artificial Sequence
  Peptide Derived from Human Papillomavirus
EFLKGTPKK

SEQ ID NO: 43591 - protein, 8 aa, Artificial Sequence
  Peptide Derived from Human Papillomavirus
EGFKTLIK

SEQ ID NO: 43592 - protein, 9 aa, Artificial Sequence
  Peptide Derived from Human Papillomavirus
EGIPFGTFK

SEQ ID NO: 43593 - protein, 8 aa, Artificial Sequence
  Peptide Derived from Human Papillomavirus
EINDKNWK

SEQ ID NO: 43594 - protein, 8 aa, Artificial Sequence
  Peptide Derived from Human Papillomavirus
EISLNSGH

SEQ ID NO: 43595 - protein, 9 aa, Artificial Sequence
  Peptide Derived from Human Papillomavirus
EISLNSGHK

SEQ ID NO: 43596 - protein, 10 aa, Artificial Sequence
  Peptide Derived from Human Papillomavirus
EISLNSGHKK

SEQ ID NO: 43597 - protein, 11 aa, Artificial Sequence
  Peptide Derived from Human Papillomavirus
ELKELLQASNK

SEQ ID NO: 43598 - protein, 8 aa, Artificial Sequence
  Peptide Derived from Human Papillomavirus
ELLQASNK

SEQ ID NO: 43599 - protein, 9 aa, Artificial Sequence
  Peptide Derived from Human Papillomavirus
ELLQASNKK

SEQ ID NO: 43600 - protein, 8 aa, Artificial Sequence
  Peptide Derived from Human Papillomavirus
ESDMAFQY

SEQ ID NO: 43601 - protein, 11 aa, Artificial Sequence
  Peptide Derived from Human Papillomavirus
ESRVTVFTFPH

SEQ ID NO: 43602 - protein, 8 aa, Artificial Sequence
  Peptide Derived from Human Papillomavirus
ETAQALFH

SEQ ID NO: 43603 - protein, 10 aa, Artificial Sequence
  Peptide Derived from Human Papillomavirus
ETCMLIEPPK

SEQ ID NO: 43604 - protein, 10 aa, Artificial Sequence
  Peptide Derived from Human Papillomavirus
EVQNDAQVLH

SEQ ID NO: 43605 - protein, 9 aa, Artificial Sequence
  Peptide Derived from Human Papillomavirus
FDKNGNPVY

SEQ ID NO: 43606 - protein, 8 aa, Artificial Sequence
  Peptide Derived from Human Papillomavirus
FFERTWSR

SEQ ID NO: 43607 - protein, 9 aa, Artificial Sequence
  Peptide Derived from Human Papillomavirus
FFVETIVEK

SEQ ID NO: 43608 - protein, 10 aa, Artificial Sequence
  Peptide Derived from Human Papillomavirus
FFVETIVEKK

SEQ ID NO: 43609 - protein, 9 aa, Artificial Sequence
  Peptide Derived from Human Papillomavirus
FISFLRALK

SEQ ID NO: 43610 - protein, 8 aa, Artificial Sequence
  Peptide Derived from Human Papillomavirus
FLKGTPKK

SEQ ID NO: 43611 - protein, 9 aa, Artificial Sequence
  Peptide Derived from Human Papillomavirus
FLKSNCQAK

SEQ ID NO: 43612 - protein, 10 aa, Artificial Sequence
  Peptide Derived from Human Papillomavirus
FLKSNCQAKY

SEQ ID NO: 43613 - protein, 10 aa, Artificial Sequence
  Peptide Derived from Human Papillomavirus
FLRALKEFLK

SEQ ID NO: 43614 - protein, 9 aa, Artificial Sequence
  Peptide Derived from Human Papillomavirus
FTDLVRNFK

SEQ ID NO: 43615 - protein, 11 aa, Artificial Sequence
  Peptide Derived from Human Papillomavirus
FTFPHAFPFDK

SEQ ID NO: 43616 - protein, 8 aa, Artificial Sequence
  Peptide Derived from Human Papillomavirus
FTISDSGY

SEQ ID NO: 43617 - protein, 8 aa, Artificial Sequence
  Peptide Derived from Human Papillomavirus
FVETIVEK

SEQ ID NO: 43618 - protein, 9 aa, Artificial Sequence
  Peptide Derived from Human Papillomavirus
FVETIVEKK

SEQ ID NO: 43619 - protein, 9 aa, Artificial Sequence
  Peptide Derived from Human Papillomavirus
GDTPEWIQR

SEQ ID NO: 43620 - protein, 11 aa, Artificial Sequence
  Peptide Derived from Human Papillomavirus
GDWRPIVQFLR

SEQ ID NO: 43621 - protein, 8 aa, Artificial Sequence
  Peptide Derived from Human Papillomavirus
GIPFGTFK

SEQ ID NO: 43622 - protein, 9 aa, Artificial Sequence
  Peptide Derived from Human Papillomavirus
GLSFTDLVR

SEQ ID NO: 43623 - protein, 8 aa, Artificial Sequence
  Peptide Derived from Human Papillomavirus
GNPISIDR

SEQ ID NO: 43624 - protein, 9 aa, Artificial Sequence
  Peptide Derived from Human Papillomavirus
GNPISIDRK

SEQ ID NO: 43625 - protein, 10 aa, Artificial Sequence
  Peptide Derived from Human Papillomavirus
GNPISIDRKH

SEQ ID NO: 43626 - protein, 11 aa, Artificial Sequence
  Peptide Derived from Human Papillomavirus
GNPISIDRKHK

SEQ ID NO: 43627 - protein, 10 aa, Artificial Sequence
  Peptide Derived from Human Papillomavirus
GNPVYEINDK

SEQ ID NO: 43628 - protein, 11 aa, Artificial Sequence
  Peptide Derived from Human Papillomavirus
GTPKKNCILLY

SEQ ID NO: 43629 - protein, 9 aa, Artificial Sequence
  Peptide Derived from Human Papillomavirus
GVEFISFLR

SEQ ID NO: 43630 - protein, 9 aa, Artificial Sequence
  Peptide Derived from Human Papillomavirus
GVLILALLR

SEQ ID NO: 43631 - protein, 10 aa, Artificial Sequence
  Peptide Derived from Human Papillomavirus
GVLILALLRY

SEQ ID NO: 43632 - protein, 11 aa, Artificial Sequence
  Peptide Derived from Human Papillomavirus
GVLILALLRYK

SEQ ID NO: 43633 - protein, 11 aa, Artificial Sequence
  Peptide Derived from Human Papillomavirus
GVNPTVAEGFK

SEQ ID NO: 43634 - protein, 8 aa, Artificial Sequence
  Peptide Derived from Human Papillomavirus
HCSITELK

SEQ ID NO: 43635 - protein, 11 aa, Artificial Sequence
  Peptide Derived from Human Papillomavirus
HFWLEPLADTK

SEQ ID NO: 43636 - protein, 8 aa, Artificial Sequence
  Peptide Derived from Human Papillomavirus
HIQCLDCK

SEQ ID NO: 43637 - protein, 10 aa, Artificial Sequence
  Peptide Derived from Human Papillomavirus
HTCWTYFDNY

SEQ ID NO: 43638 - protein, 8 aa, Artificial Sequence
  Peptide Derived from Human Papillomavirus
IDEGGDWR

SEQ ID NO: 43639 - protein, 8 aa, Artificial Sequence
  Peptide Derived from Human Papillomavirus
IDPAKDNK

SEQ ID NO: 43640 - protein, 11 aa, Artificial Sequence
  Peptide Derived from Human Papillomavirus
IDPAKDNKWPY

SEQ ID NO: 43641 - protein, 10 aa, Artificial Sequence
  Peptide Derived from Human Papillomavirus
IISFVNSNSH

SEQ ID NO: 43642 - protein, 8 aa, Artificial Sequence
  Peptide Derived from Human Papillomavirus
ILALLRYK

SEQ ID NO: 43643 - protein, 11 aa, Artificial Sequence
  Peptide Derived from Human Papillomavirus
ILALLRYKCGK

SEQ ID NO: 43644 - protein, 11 aa, Artificial Sequence
  Peptide Derived from Human Papillomavirus
ILLTSNIDPAK

SEQ ID NO: 43645 - protein, 11 aa, Artificial Sequence
  Peptide Derived from Human Papillomavirus
ILLYGPANTGK

SEQ ID NO: 43646 - protein, 8 aa, Artificial Sequence
  Peptide Derived from Human Papillomavirus
ISFLRALK

SEQ ID NO: 43647 - protein, 9 aa, Artificial Sequence
  Peptide Derived from Human Papillomavirus
ISFVNSNSH

SEQ ID NO: 43648 - protein, 8 aa, Artificial Sequence
  Peptide Derived from Human Papillomavirus
ISIDRKHK

SEQ ID NO: 43649 - protein, 8 aa, Artificial Sequence
  Peptide Derived from Human Papillomavirus
ISLNSGHK

SEQ ID NO: 43650 - protein, 9 aa, Artificial Sequence
  Peptide Derived from Human Papillomavirus
ISLNSGHKK

SEQ ID NO: 43651 - protein, 11 aa, Artificial Sequence
  Peptide Derived from Human Papillomavirus
ISLNSGHKKAK

SEQ ID NO: 43652 - protein, 9 aa, Artificial Sequence
  Peptide Derived from Human Papillomavirus
KAAMLAVFK

SEQ ID NO: 43653 - protein, 10 aa, Artificial Sequence
  Peptide Derived from Human Papillomavirus
KCFFERTWSR

SEQ ID NO: 43654 - protein, 11 aa, Artificial Sequence
  Peptide Derived from Human Papillomavirus
KCGKNRLTVAK

SEQ ID NO: 43655 - protein, 9 aa, Artificial Sequence
  Peptide Derived from Human Papillomavirus
KCVTGQNTR

SEQ ID NO: 43656 - protein, 8 aa, Artificial Sequence
  Peptide Derived from Human Papillomavirus
KDCAVMCR

SEQ ID NO: 43657 - protein, 9 aa, Artificial Sequence
  Peptide Derived from Human Papillomavirus
KDCAVMCRH

SEQ ID NO: 43658 - protein, 10 aa, Artificial Sequence
  Peptide Derived from Human Papillomavirus
KDCAVMCRHY

SEQ ID NO: 43659 - protein, 11 aa, Artificial Sequence
  Peptide Derived from Human Papillomavirus
KDCAVMCRHYK

SEQ ID NO: 43660 - protein, 11 aa, Artificial Sequence
  Peptide Derived from Human Papillomavirus
KDNKWPYLESR

SEQ ID NO: 43661 - protein, 8 aa, Artificial Sequence
  Peptide Derived from Human Papillomavirus
KGLSTLLH

SEQ ID NO: 43662 - protein, 9 aa, Artificial Sequence
  Peptide Derived from Human Papillomavirus
KIDEGGDWR

SEQ ID NO: 43663 - protein, 10 aa, Artificial Sequence
  Peptide Derived from Human Papillomavirus
KLRSSVAALY

SEQ ID NO: 43664 - protein, 8 aa, Artificial Sequence
  Peptide Derived from Human Papillomavirus
KNRLTVAK

SEQ ID NO: 43665 - protein, 9 aa, Artificial Sequence
  Peptide Derived from Human Papillomavirus
KNWKCFFER

SEQ ID NO: 43666 - protein, 8 aa, Artificial Sequence
  Peptide Derived from Human Papillomavirus
KSNCQAKY

SEQ ID NO: 43667 - protein, 10 aa, Artificial Sequence
  Peptide Derived from Human Papillomavirus
KSNCQAKYLK

SEQ ID NO: 43668 - protein, 10 aa, Artificial Sequence
  Peptide Derived from Human Papillomavirus
KSYFGMSFIH

SEQ ID NO: 43669 - protein, 10 aa, Artificial Sequence
  Peptide Derived from Human Papillomavirus
KTLIKPATLY

SEQ ID NO: 43670 - protein, 10 aa, Artificial Sequence
  Peptide Derived from Human Papillomavirus
KVAMLDDATH

SEQ ID NO: 43671 - protein, 10 aa, Artificial Sequence
  Peptide Derived from Human Papillomavirus
LALLRYKCGK

SEQ ID NO: 43672 - protein, 8 aa, Artificial Sequence
  Peptide Derived from Human Papillomavirus
LAVFKDIY

SEQ ID NO: 43673 - protein, 11 aa, Artificial Sequence
  Peptide Derived from Human Papillomavirus
LDDATHTCWTY

SEQ ID NO: 43674 - protein, 10 aa, Artificial Sequence
  Peptide Derived from Human Papillomavirus
LDGNPISIDR

SEQ ID NO: 43675 - protein, 11 aa, Artificial Sequence
  Peptide Derived from Human Papillomavirus
LDGNPISIDRK

SEQ ID NO: 43676 - protein, 9 aa, Artificial Sequence
  Peptide Derived from Human Papillomavirus
LFTISDSGY

SEQ ID NO: 43677 - protein, 8 aa, Artificial Sequence
  Peptide Derived from Human Papillomavirus
LIEPPKLR

SEQ ID NO: 43678 - protein, 8 aa, Artificial Sequence
  Peptide Derived from Human Papillomavirus
LIKPATLY

SEQ ID NO: 43679 - protein, 10 aa, Artificial Sequence
  Peptide Derived from Human Papillomavirus
LIKPATLYAH

SEQ ID NO: 43680 - protein, 8 aa, Artificial Sequence
  Peptide Derived from Human Papillomavirus
LILALLRY

SEQ ID NO: 43681 - protein, 9 aa, Artificial Sequence
  Peptide Derived from Human Papillomavirus
LILALLRYK

SEQ ID NO: 43682 - protein, 11 aa, Artificial Sequence
  Peptide Derived from Human Papillomavirus
LLKRKFAGGSK

SEQ ID NO: 43683 - protein, 8 aa, Artificial Sequence
  Peptide Derived from Human Papillomavirus
LLQASNKK

SEQ ID NO: 43684 - protein, 8 aa, Artificial Sequence
  Peptide Derived from Human Papillomavirus
LLRYKCGK

SEQ ID NO: 43685 - protein, 10 aa, Artificial Sequence
  Peptide Derived from Human Papillomavirus
LLRYKCGKNR

SEQ ID NO: 43686 - protein, 10 aa, Artificial Sequence
  Peptide Derived from Human Papillomavirus
LLTSNIDPAK

SEQ ID NO: 43687 - protein, 10 aa, Artificial Sequence
  Peptide Derived from Human Papillomavirus
LLYGPANTGK

SEQ ID NO: 43688 - protein, 9 aa, Artificial Sequence
  Peptide Derived from Human Papillomavirus
LNSGHKKAK

SEQ ID NO: 43689 - protein, 10 aa, Artificial Sequence
  Peptide Derived from Human Papillomavirus
LNSGHKKAKR

SEQ ID NO: 43690 - protein, 11 aa, Artificial Sequence
  Peptide Derived from Human Papillomavirus
LNSGHKKAKRR

SEQ ID NO: 43691 - protein, 8 aa, Artificial Sequence
  Peptide Derived from Human Papillomavirus
LSFTDLVR

SEQ ID NO: 43692 - protein, 11 aa, Artificial Sequence
  Peptide Derived from Human Papillomavirus
LSFTDLVRNFK

SEQ ID NO: 43693 - protein, 10 aa, Artificial Sequence
  Peptide Derived from Human Papillomavirus
LSVDTDLSPR

SEQ ID NO: 43694 - protein, 11 aa, Artificial Sequence
  Peptide Derived from Human Papillomavirus
LTDESDMAFQY

SEQ ID NO: 43695 - protein, 9 aa, Artificial Sequence
  Peptide Derived from Human Papillomavirus
LTSNIDPAK

SEQ ID NO: 43696 - protein, 9 aa, Artificial Sequence
  Peptide Derived from Human Papillomavirus
LVRNFKSDK

SEQ ID NO: 43697 - protein, 10 aa, Artificial Sequence
  Peptide Derived from Human Papillomavirus
MCRHYKRAQK

SEQ ID NO: 43698 - protein, 11 aa, Artificial Sequence
  Peptide Derived from Human Papillomavirus
MCRHYKRAQKR

SEQ ID NO: 43699 - protein, 9 aa, Artificial Sequence
  Peptide Derived from Human Papillomavirus
MLAVFKDIY

SEQ ID NO: 43700 - protein, 9 aa, Artificial Sequence
  Peptide Derived from Human Papillomavirus
MLIEPPKLR

SEQ ID NO: 43701 - protein, 8 aa, Artificial Sequence
  Peptide Derived from Human Papillomavirus
MNMSQWIK

SEQ ID NO: 43702 - protein, 9 aa, Artificial Sequence
  Peptide Derived from Human Papillomavirus
MNMSQWIKY

SEQ ID NO: 43703 - protein, 10 aa, Artificial Sequence
  Peptide Derived from Human Papillomavirus
MNMSQWIKYR

SEQ ID NO: 43704 - protein, 8 aa, Artificial Sequence
  Peptide Derived from Human Papillomavirus
MSQWIKYR

SEQ ID NO: 43705 - protein, 11 aa, Artificial Sequence
  Peptide Derived from Human Papillomavirus
MSQWIKYRCSK

SEQ ID NO: 43706 - protein, 9 aa, Artificial Sequence
  Peptide Derived from Human Papillomavirus
NAENGGSVH

SEQ ID NO: 43707 - protein, 8 aa, Artificial Sequence
  Peptide Derived from Human Papillomavirus
NAENVDPH

SEQ ID NO: 43708 - protein, 8 aa, Artificial Sequence
  Peptide Derived from Human Papillomavirus
NCQAKYLK

SEQ ID NO: 43709 - protein, 10 aa, Artificial Sequence
  Peptide Derived from Human Papillomavirus
NDAQVLHLLK

SEQ ID NO: 43710 - protein, 11 aa, Artificial Sequence
  Peptide Derived from Human Papillomavirus
NDAQVLHLLKR

SEQ ID NO: 43711 - protein, 11 aa, Artificial Sequence
  Peptide Derived from Human Papillomavirus
NDKNWKCFFER

SEQ ID NO: 43712 - protein, 11 aa, Artificial Sequence
  Peptide Derived from Human Papillomavirus
NGNPVYEINDK

SEQ ID NO: 43713 - protein, 9 aa, Artificial Sequence
  Peptide Derived from Human Papillomavirus
NIDPAKDNK

SEQ ID NO: 43714 - protein, 8 aa, Artificial Sequence
  Peptide Derived from Human Papillomavirus
NMSQWIKY

SEQ ID NO: 43715 - protein, 9 aa, Artificial Sequence
  Peptide Derived from Human Papillomavirus
NMSQWIKYR

SEQ ID NO: 43716 - protein, 8 aa, Artificial Sequence
  Peptide Derived from Human Papillomavirus
NSGHKKAK

SEQ ID NO: 43717 - protein, 9 aa, Artificial Sequence
  Peptide Derived from Human Papillomavirus
NSGHKKAKR

SEQ ID NO: 43718 - protein, 10 aa, Artificial Sequence
  Peptide Derived from Human Papillomavirus
NSGHKKAKRR

SEQ ID NO: 43719 - protein, 9 aa, Artificial Sequence
  Peptide Derived from Human Papillomavirus
NSNAAAFLK

SEQ ID NO: 43720 - protein, 11 aa, Artificial Sequence
  Peptide Derived from Human Papillomavirus
NTNAENGGSVH

SEQ ID NO: 43721 - protein, 9 aa, Artificial Sequence
  Peptide Derived from Human Papillomavirus
PAKDNKWPY

SEQ ID NO: 43722 - protein, 8 aa, Artificial Sequence
  Peptide Derived from Human Papillomavirus
PANTGKSY

SEQ ID NO: 43723 - protein, 10 aa, Artificial Sequence
  Peptide Derived from Human Papillomavirus
PFDKNGNPVY

SEQ ID NO: 43724 - protein, 8 aa, Artificial Sequence
  Peptide Derived from Human Papillomavirus
PISIDRKH

SEQ ID NO: 43725 - protein, 9 aa, Artificial Sequence
  Peptide Derived from Human Papillomavirus
PISIDRKHK

SEQ ID NO: 43726 - protein, 8 aa, Artificial Sequence
  Peptide Derived from Human Papillomavirus
PIVQFLRY

SEQ ID NO: 43727 - protein, 8 aa, Artificial Sequence
  Peptide Derived from Human Papillomavirus
PTVAEGFK

SEQ ID NO: 43728 - protein, 8 aa, Artificial Sequence
  Peptide Derived from Human Papillomavirus
PVYEINDK

SEQ ID NO: 43729 - protein, 11 aa, Artificial Sequence
  Peptide Derived from Human Papillomavirus
PVYEINDKNWK

SEQ ID NO: 43730 - protein, 10 aa, Artificial Sequence
  Peptide Derived from Human Papillomavirus
QGVEFISFLR

SEQ ID NO: 43731 - protein, 11 aa, Artificial Sequence
  Peptide Derived from Human Papillomavirus
QLSVDTDLSPR

SEQ ID NO: 43732 - protein, 9 aa, Artificial Sequence
  Peptide Derived from Human Papillomavirus
QMNMSQWIK

SEQ ID NO: 43733 - protein, 10 aa, Artificial Sequence
  Peptide Derived from Human Papillomavirus
QMNMSQWIKY

SEQ ID NO: 43734 - protein, 11 aa, Artificial Sequence
  Peptide Derived from Human Papillomavirus
QMNMSQWIKYR

SEQ ID NO: 43735 - protein, 8 aa, Artificial Sequence
  Peptide Derived from Human Papillomavirus
QNDAQVLH

SEQ ID NO: 43736 - protein, 11 aa, Artificial Sequence
  Peptide Derived from Human Papillomavirus
QNDAQVLHLLK

SEQ ID NO: 43737 - protein, 8 aa, Artificial Sequence
  Peptide Derived from Human Papillomavirus
QVLHLLKR

SEQ ID NO: 43738 - protein, 9 aa, Artificial Sequence
  Peptide Derived from Human Papillomavirus
QVLHLLKRK

SEQ ID NO: 43739 - protein, 8 aa, Artificial Sequence
  Peptide Derived from Human Papillomavirus
RALKEFLK

SEQ ID NO: 43740 - protein, 10 aa, Artificial Sequence
  Peptide Derived from Human Papillomavirus
RLFTISDSGY

SEQ ID NO: 43741 - protein, 11 aa, Artificial Sequence
  Peptide Derived from Human Papillomavirus
RLQEISLNSGH

SEQ ID NO: 43742 - protein, 8 aa, Artificial Sequence
  Peptide Derived from Human Papillomavirus
RSSVAALY

SEQ ID NO: 43743 - protein, 10 aa, Artificial Sequence
  Peptide Derived from Human Papillomavirus
RSSVAALYWY

SEQ ID NO: 43744 - protein, 11 aa, Artificial Sequence
  Peptide Derived from Human Papillomavirus
RSSVAALYWYR

SEQ ID NO: 43745 - protein, 9 aa, Artificial Sequence
  Peptide Derived from Human Papillomavirus
RTWSRLDLH

SEQ ID NO: 43746 - protein, 9 aa, Artificial Sequence
  Peptide Derived from Human Papillomavirus
RVTVFTFPH

SEQ ID NO: 43747 - protein, 10 aa, Artificial Sequence
  Peptide Derived from Human Papillomavirus
SDNAENVDPH

SEQ ID NO: 43748 - protein, 11 aa, Artificial Sequence
  Peptide Derived from Human Papillomavirus
SFLRALKEFLK

SEQ ID NO: 43749 - protein, 10 aa, Artificial Sequence
  Peptide Derived from Human Papillomavirus
SFTDLVRNFK

SEQ ID NO: 43750 - protein, 8 aa, Artificial Sequence
  Peptide Derived from Human Papillomavirus
SFVNSNSH

SEQ ID NO: 43751 - protein, 10 aa, Artificial Sequence
  Peptide Derived from Human Papillomavirus
SGDTPEWIQR

SEQ ID NO: 43752 - protein, 8 aa, Artificial Sequence
  Peptide Derived from Human Papillomavirus
SGHKKAKR

SEQ ID NO: 43753 - protein, 9 aa, Artificial Sequence
  Peptide Derived from Human Papillomavirus
SGHKKAKRR

SEQ ID NO: 43754 - protein, 8 aa, Artificial Sequence
  Peptide Derived from Human Papillomavirus
SLNSGHKK

SEQ ID NO: 43755 - protein, 10 aa, Artificial Sequence
  Peptide Derived from Human Papillomavirus
SLNSGHKKAK

SEQ ID NO: 43756 - protein, 11 aa, Artificial Sequence
  Peptide Derived from Human Papillomavirus
SLNSGHKKAKR

SEQ ID NO: 43757 - protein, 8 aa, Artificial Sequence
  Peptide Derived from Human Papillomavirus
SNAAAFLK

SEQ ID NO: 43758 - protein, 9 aa, Artificial Sequence
  Peptide Derived from Human Papillomavirus
SNCQAKYLK

SEQ ID NO: 43759 - protein, 10 aa, Artificial Sequence
  Peptide Derived from Human Papillomavirus
SNIDPAKDNK

SEQ ID NO: 43760 - protein, 11 aa, Artificial Sequence
  Peptide Derived from Human Papillomavirus
SSDNAENVDPH

SEQ ID NO: 43761 - protein, 9 aa, Artificial Sequence
  Peptide Derived from Human Papillomavirus
SSVAALYWY

SEQ ID NO: 43762 - protein, 10 aa, Artificial Sequence
  Peptide Derived from Human Papillomavirus
SSVAALYWYR

SEQ ID NO: 43763 - protein, 8 aa, Artificial Sequence
  Peptide Derived from Human Papillomavirus
SVAALYWY

SEQ ID NO: 43764 - protein, 9 aa, Artificial Sequence
  Peptide Derived from Human Papillomavirus
SVAALYWYR

SEQ ID NO: 43765 - protein, 9 aa, Artificial Sequence
  Peptide Derived from Human Papillomavirus
SVDTDLSPR

SEQ ID NO: 43766 - protein, 9 aa, Artificial Sequence
  Peptide Derived from Human Papillomavirus
TCMLIEPPK

SEQ ID NO: 43767 - protein, 11 aa, Artificial Sequence
  Peptide Derived from Human Papillomavirus
TCMLIEPPKLR

SEQ ID NO: 43768 - protein, 9 aa, Artificial Sequence
  Peptide Derived from Human Papillomavirus
TCWTYFDNY

SEQ ID NO: 43769 - protein, 11 aa, Artificial Sequence
  Peptide Derived from Human Papillomavirus
TCWTYFDNYMR

SEQ ID NO: 43770 - protein, 10 aa, Artificial Sequence
  Peptide Derived from Human Papillomavirus
TDESDMAFQY

SEQ ID NO: 43771 - protein, 8 aa, Artificial Sequence
  Peptide Derived from Human Papillomavirus
TDLVRNFK

SEQ ID NO: 43772 - protein, 11 aa, Artificial Sequence
  Peptide Derived from Human Papillomavirus
TDLVRNFKSDK

SEQ ID NO: 43773 - protein, 11 aa, Artificial Sequence
  Peptide Derived from Human Papillomavirus
TFKCVTGQNTR

SEQ ID NO: 43774 - protein, 10 aa, Artificial Sequence
  Peptide Derived from Human Papillomavirus
TFPHAFPFDK

SEQ ID NO: 43775 - protein, 9 aa, Artificial Sequence
  Peptide Derived from Human Papillomavirus
TLIKPATLY

SEQ ID NO: 43776 - protein, 11 aa, Artificial Sequence
  Peptide Derived from Human Papillomavirus
TLIKPATLYAH

SEQ ID NO: 43777 - protein, 10 aa, Artificial Sequence
  Peptide Derived from Human Papillomavirus
TNAENGGSVH

SEQ ID NO: 43778 - protein, 8 aa, Artificial Sequence
  Peptide Derived from Human Papillomavirus
TSNIDPAK

SEQ ID NO: 43779 - protein, 11 aa, Artificial Sequence
  Peptide Derived from Human Papillomavirus
TSNIDPAKDNK

SEQ ID NO: 43780 - protein, 11 aa, Artificial Sequence
  Peptide Derived from Human Papillomavirus
TVAEGFKTLIK

SEQ ID NO: 43781 - protein, 11 aa, Artificial Sequence
  Peptide Derived from Human Papillomavirus
TVAKGLSTLLH

SEQ ID NO: 43782 - protein, 8 aa, Artificial Sequence
  Peptide Derived from Human Papillomavirus
VAALYWYR

SEQ ID NO: 43783 - protein, 10 aa, Artificial Sequence
  Peptide Derived from Human Papillomavirus
VAEGFKTLIK

SEQ ID NO: 43784 - protein, 10 aa, Artificial Sequence
  Peptide Derived from Human Papillomavirus
VAKGLSTLLH

SEQ ID NO: 43785 - protein, 9 aa, Artificial Sequence
  Peptide Derived from Human Papillomavirus
VAMLDDATH

SEQ ID NO: 43786 - protein, 11 aa, Artificial Sequence
  Peptide Derived from Human Papillomavirus
VDPHCSITELK

SEQ ID NO: 43787 - protein, 8 aa, Artificial Sequence
  Peptide Derived from Human Papillomavirus
VDTDLSPR

SEQ ID NO: 43788 - protein, 8 aa, Artificial Sequence
  Peptide Derived from Human Papillomavirus
VLHLLKRK

SEQ ID NO: 43789 - protein, 8 aa, Artificial Sequence
  Peptide Derived from Human Papillomavirus
VLILALLR

SEQ ID NO: 43790 - protein, 9 aa, Artificial Sequence
  Peptide Derived from Human Papillomavirus
VLILALLRY

SEQ ID NO: 43791 - protein, 10 aa, Artificial Sequence
  Peptide Derived from Human Papillomavirus
VLILALLRYK

SEQ ID NO: 43792 - protein, 8 aa, Artificial Sequence
  Peptide Derived from Human Papillomavirus
VMCRHYKR

SEQ ID NO: 43793 - protein, 11 aa, Artificial Sequence
  Peptide Derived from Human Papillomavirus
VMCRHYKRAQK

SEQ ID NO: 43794 - protein, 10 aa, Artificial Sequence
  Peptide Derived from Human Papillomavirus
VNPTVAEGFK

SEQ ID NO: 43795 - protein, 11 aa, Artificial Sequence
  Peptide Derived from Human Papillomavirus
VSGDTPEWIQR

SEQ ID NO: 43796 - protein, 8 aa, Artificial Sequence
  Peptide Derived from Human Papillomavirus
VTVFTFPH

SEQ ID NO: 43797 - protein, 10 aa, Artificial Sequence
  Peptide Derived from Human Papillomavirus
WFFVETIVEK

SEQ ID NO: 43798 - protein, 11 aa, Artificial Sequence
  Peptide Derived from Human Papillomavirus
WFFVETIVEKK

SEQ ID NO: 43799 - protein, 10 aa, Artificial Sequence
  Peptide Derived from Human Papillomavirus
WGVLILALLR

SEQ ID NO: 43800 - protein, 11 aa, Artificial Sequence
  Peptide Derived from Human Papillomavirus
WGVLILALLRY

SEQ ID NO: 43801 - protein, 8 aa, Artificial Sequence
  Peptide Derived from Human Papillomavirus
WIKYRCSK

SEQ ID NO: 43802 - protein, 10 aa, Artificial Sequence
  Peptide Derived from Human Papillomavirus
WIQRLTIIQH

SEQ ID NO: 43803 - protein, 9 aa, Artificial Sequence
  Peptide Derived from Human Papillomavirus
WLEPLADTK

SEQ ID NO: 43804 - protein, 9 aa, Artificial Sequence
  Peptide Derived from Human Papillomavirus
WTYFDNYMR

SEQ ID NO: 43805 - protein, 10 aa, Artificial Sequence
  Peptide Derived from Human Papillomavirus
YAHIQCLDCK

SEQ ID NO: 43806 - protein, 8 aa, Artificial Sequence
  Peptide Derived from Human Papillomavirus
YFGMSFIH

SEQ ID NO: 43807 - protein, 10 aa, Artificial Sequence
  Peptide Derived from Human Papillomavirus
YGLSFTDLVR

SEQ ID NO: 43808 - protein, 8 aa, Artificial Sequence
  Peptide Derived from Human Papillomavirus
YGPANTGK

SEQ ID NO: 43809 - protein, 10 aa, Artificial Sequence
  Peptide Derived from Human Papillomavirus
YGPANTGKSY

SEQ ID NO: 43810 - protein, 10 aa, Artificial Sequence
  Peptide Derived from Human Papillomavirus
YLKDCAVMCR

SEQ ID NO: 43811 - protein, 11 aa, Artificial Sequence
  Peptide Derived from Human Papillomavirus
YLKDCAVMCRH

SEQ ID NO: 43812 - protein, 10 aa, Artificial Sequence
  Peptide Derived from Human Papillomavirus
AACVSYWGVY

SEQ ID NO: 43813 - protein, 11 aa, Artificial Sequence
  Peptide Derived from Human Papillomavirus
AACVSYWGVYY

SEQ ID NO: 43814 - protein, 9 aa, Artificial Sequence
  Peptide Derived from Human Papillomavirus
ACVSYWGVY

SEQ ID NO: 43815 - protein, 10 aa, Artificial Sequence
  Peptide Derived from Human Papillomavirus
ACVSYWGVYY

SEQ ID NO: 43816 - protein, 9 aa, Artificial Sequence
  Peptide Derived from Human Papillomavirus
AIELQMALK

SEQ ID NO: 43817 - protein, 9 aa, Artificial Sequence
  Peptide Derived from Human Papillomavirus
AILFTAREH

SEQ ID NO: 43818 - protein, 9 aa, Artificial Sequence
  Peptide Derived from Human Papillomavirus
ALKGLAQSK

SEQ ID NO: 43819 - protein, 10 aa, Artificial Sequence
  Peptide Derived from Human Papillomavirus
ALKGLAQSKY

SEQ ID NO: 43820 - protein, 9 aa, Artificial Sequence
  Peptide Derived from Human Papillomavirus
ALQDKILDH

SEQ ID NO: 43821 - protein, 10 aa, Artificial Sequence
  Peptide Derived from Human Papillomavirus
ALQDKILDHY

SEQ ID NO: 43822 - protein, 9 aa, Artificial Sequence
  Peptide Derived from Human Papillomavirus
ASVGTPKPH

SEQ ID NO: 43823 - protein, 10 aa, Artificial Sequence
  Peptide Derived from Human Papillomavirus
ATQIVRQLQH

SEQ ID NO: 43824 - protein, 10 aa, Artificial Sequence
  Peptide Derived from Human Papillomavirus
CFKKGGKTVH

SEQ ID NO: 43825 - protein, 8 aa, Artificial Sequence
  Peptide Derived from Human Papillomavirus
CGLTEQHH

SEQ ID NO: 43826 - protein, 10 aa, Artificial Sequence
  Peptide Derived from Human Papillomavirus
CGLTEQHHGR

SEQ ID NO: 43827 - protein, 8 aa, Artificial Sequence
  Peptide Derived from Human Papillomavirus
CLRYRLRK

SEQ ID NO: 43828 - protein, 9 aa, Artificial Sequence
  Peptide Derived from Human Papillomavirus
CLRYRLRKY

SEQ ID NO: 43829 - protein, 11 aa, Artificial Sequence
  Peptide Derived from Human Papillomavirus
CMNYVVWDSIY

SEQ ID NO: 43830 - protein, 10 aa, Artificial Sequence
  Peptide Derived from Human Papillomavirus
CSGNTTPIIH

SEQ ID NO: 43831 - protein, 8 aa, Artificial Sequence
  Peptide Derived from Human Papillomavirus
CSSTSNNK

SEQ ID NO: 43832 - protein, 9 aa, Artificial Sequence
  Peptide Derived from Human Papillomavirus
CSSTSNNKR

SEQ ID NO: 43833 - protein, 10 aa, Artificial Sequence
  Peptide Derived from Human Papillomavirus
CSSTSNNKRR

SEQ ID NO: 43834 - protein, 11 aa, Artificial Sequence
  Peptide Derived from Human Papillomavirus
CSSTSNNKRRK

SEQ ID NO: 43835 - protein, 8 aa, Artificial Sequence
  Peptide Derived from Human Papillomavirus
CVSYWGVY

SEQ ID NO: 43836 - protein, 9 aa, Artificial Sequence
  Peptide Derived from Human Papillomavirus
CVSYWGVYY

SEQ ID NO: 43837 - protein, 11 aa, Artificial Sequence
  Peptide Derived from Human Papillomavirus
CVSYWGVYYIK

SEQ ID NO: 43838 - protein, 11 aa, Artificial Sequence
  Peptide Derived from Human Papillomavirus
DDTVSATQIVR

SEQ ID NO: 43839 - protein, 11 aa, Artificial Sequence
  Peptide Derived from Human Papillomavirus
DGDTTYYVQFK

SEQ ID NO: 43840 - protein, 10 aa, Artificial Sequence
  Peptide Derived from Human Papillomavirus
DGNKDNCMNY

SEQ ID NO: 43841 - protein, 8 aa, Artificial Sequence
  Peptide Derived from Human Papillomavirus
DINSQISY

SEQ ID NO: 43842 - protein, 11 aa, Artificial Sequence
  Peptide Derived from Human Papillomavirus
DSKDINSQISY

SEQ ID NO: 43843 - protein, 9 aa, Artificial Sequence
  Peptide Derived from Human Papillomavirus
DTTYYVQFK

SEQ ID NO: 43844 - protein, 10 aa, Artificial Sequence
  Peptide Derived from Human Papillomavirus
DTVSATQIVR

SEQ ID NO: 43845 - protein, 9 aa, Artificial Sequence
  Peptide Derived from Human Papillomavirus
ENAILFTAR

SEQ ID NO: 43846 - protein, 11 aa, Artificial Sequence
  Peptide Derived from Human Papillomavirus
ENAILFTAREH

SEQ ID NO: 43847 - protein, 11 aa, Artificial Sequence
  Peptide Derived from Human Papillomavirus
FDGNKDNCMNY

SEQ ID NO: 43848 - protein, 10 aa, Artificial Sequence
  Peptide Derived from Human Papillomavirus
FTAREHGITK

SEQ ID NO: 43849 - protein, 10 aa, Artificial Sequence
  Peptide Derived from Human Papillomavirus
GDKNSLKCLR

SEQ ID NO: 43850 - protein, 11 aa, Artificial Sequence
  Peptide Derived from Human Papillomavirus
GDKNSLKCLRY

SEQ ID NO: 43851 - protein, 10 aa, Artificial Sequence
  Peptide Derived from Human Papillomavirus
GDTTYYVQFK

SEQ ID NO: 43852 - protein, 8 aa, Artificial Sequence
  Peptide Derived from Human Papillomavirus
GGKTVHVY

SEQ ID NO: 43853 - protein, 9 aa, Artificial Sequence
  Peptide Derived from Human Papillomavirus
GLTEQHHGR

SEQ ID NO: 43854 - protein, 9 aa, Artificial Sequence
  Peptide Derived from Human Papillomavirus
GNKDNCMNY

SEQ ID NO: 43855 - protein, 10 aa, Artificial Sequence
  Peptide Derived from Human Papillomavirus
GNSNTWEVQY

SEQ ID NO: 43856 - protein, 8 aa, Artificial Sequence
  Peptide Derived from Human Papillomavirus
GNTTPIIH

SEQ ID NO: 43857 - protein, 10 aa, Artificial Sequence
  Peptide Derived from Human Papillomavirus
GNTTPIIHLK

SEQ ID NO: 43858 - protein, 8 aa, Artificial Sequence
  Peptide Derived from Human Papillomavirus
HASTSTPK

SEQ ID NO: 43859 - protein, 8 aa, Artificial Sequence
  Peptide Derived from Human Papillomavirus
HGITKLNH

SEQ ID NO: 43860 - protein, 9 aa, Artificial Sequence
  Peptide Derived from Human Papillomavirus
HGRVNTHVH

SEQ ID NO: 43861 - protein, 8 aa, Artificial Sequence
  Peptide Derived from Human Papillomavirus
HIQTPATK

SEQ ID NO: 43862 - protein, 9 aa, Artificial Sequence
  Peptide Derived from Human Papillomavirus
HIQTPATKR

SEQ ID NO: 43863 - protein, 11 aa, Artificial Sequence
  Peptide Derived from Human Papillomavirus
HIQTPATKRPR

SEQ ID NO: 43864 - protein, 10 aa, Artificial Sequence
  Peptide Derived from Human Papillomavirus
HLKGDKNSLK

SEQ ID NO: 43865 - protein, 8 aa, Artificial Sequence
  Peptide Derived from Human Papillomavirus
HVYFDGNK

SEQ ID NO: 43866 - protein, 8 aa, Artificial Sequence
  Peptide Derived from Human Papillomavirus
IIHLKGDK

SEQ ID NO: 43867 - protein, 10 aa, Artificial Sequence
  Peptide Derived from Human Papillomavirus
ILDHYENDSK

SEQ ID NO: 43868 - protein, 8 aa, Artificial Sequence
  Peptide Derived from Human Papillomavirus
ILFTAREH

SEQ ID NO: 43869 - protein, 9 aa, Artificial Sequence
  Peptide Derived from Human Papillomavirus
INISKSKAH

SEQ ID NO: 43870 - protein, 10 aa, Artificial Sequence
  Peptide Derived from Human Papillomavirus
INISKSKAHK

SEQ ID NO: 43871 - protein, 8 aa, Artificial Sequence
  Peptide Derived from Human Papillomavirus
ISKSKAHK

SEQ ID NO: 43872 - protein, 8 aa, Artificial Sequence
  Peptide Derived from Human Papillomavirus
ISYWQLIR

SEQ ID NO: 43873 - protein, 9 aa, Artificial Sequence
  Peptide Derived from Human Papillomavirus
ITETGIWDK

SEQ ID NO: 43874 - protein, 10 aa, Artificial Sequence
  Peptide Derived from Human Papillomavirus
KAIELQMALK

SEQ ID NO: 43875 - protein, 8 aa, Artificial Sequence
  Peptide Derived from Human Papillomavirus
KCLRYRLR

SEQ ID NO: 43876 - protein, 9 aa, Artificial Sequence
  Peptide Derived from Human Papillomavirus
KCLRYRLRK

SEQ ID NO: 43877 - protein, 10 aa, Artificial Sequence
  Peptide Derived from Human Papillomavirus
KCLRYRLRKY

SEQ ID NO: 43878 - protein, 8 aa, Artificial Sequence
  Peptide Derived from Human Papillomavirus
KDGDTTYY

SEQ ID NO: 43879 - protein, 9 aa, Artificial Sequence
  Peptide Derived from Human Papillomavirus
KDINSQISY

SEQ ID NO: 43880 - protein, 8 aa, Artificial Sequence
  Peptide Derived from Human Papillomavirus
KGDKNSLK

SEQ ID NO: 43881 - protein, 11 aa, Artificial Sequence
  Peptide Derived from Human Papillomavirus
KGDKNSLKCLR

SEQ ID NO: 43882 - protein, 9 aa, Artificial Sequence
  Peptide Derived from Human Papillomavirus
KGGKTVHVY

SEQ ID NO: 43883 - protein, 8 aa, Artificial Sequence
  Peptide Derived from Human Papillomavirus
KGLAQSKY

SEQ ID NO: 43884 - protein, 11 aa, Artificial Sequence
  Peptide Derived from Human Papillomavirus
KILDHYENDSK

SEQ ID NO: 43885 - protein, 8 aa, Artificial Sequence
  Peptide Derived from Human Papillomavirus
KNSLKCLR

SEQ ID NO: 43886 - protein, 9 aa, Artificial Sequence
  Peptide Derived from Human Papillomavirus
KNSLKCLRY

SEQ ID NO: 43887 - protein, 10 aa, Artificial Sequence
  Peptide Derived from Human Papillomavirus
KNSLKCLRYR

SEQ ID NO: 43888 - protein, 10 aa, Artificial Sequence
  Peptide Derived from Human Papillomavirus
KNTGILTVTY

SEQ ID NO: 43889 - protein, 8 aa, Artificial Sequence
  Peptide Derived from Human Papillomavirus
KTAACVSY

SEQ ID NO: 43890 - protein, 9 aa, Artificial Sequence
  Peptide Derived from Human Papillomavirus
KTASVGTPK

SEQ ID NO: 43891 - protein, 11 aa, Artificial Sequence
  Peptide Derived from Human Papillomavirus
KTASVGTPKPH

SEQ ID NO: 43892 - protein, 11 aa, Artificial Sequence
  Peptide Derived from Human Papillomavirus
KTVHVYFDGNK

SEQ ID NO: 43893 - protein, 9 aa, Artificial Sequence
  Peptide Derived from Human Papillomavirus
LCSSTSNNK

SEQ ID NO: 43894 - protein, 10 aa, Artificial Sequence
  Peptide Derived from Human Papillomavirus
LCSSTSNNKR

SEQ ID NO: 43895 - protein, 11 aa, Artificial Sequence
  Peptide Derived from Human Papillomavirus
LCSSTSNNKRR

SEQ ID NO: 43896 - protein, 9 aa, Artificial Sequence
  Peptide Derived from Human Papillomavirus
LDHYENDSK

SEQ ID NO: 43897 - protein, 11 aa, Artificial Sequence
  Peptide Derived from Human Papillomavirus
LFTAREHGITK

SEQ ID NO: 43898 - protein, 10 aa, Artificial Sequence
  Peptide Derived from Human Papillomavirus
LLCSSTSNNK

SEQ ID NO: 43899 - protein, 11 aa, Artificial Sequence
  Peptide Derived from Human Papillomavirus
LLCSSTSNNKR

SEQ ID NO: 43900 - protein, 11 aa, Artificial Sequence
  Peptide Derived from Human Papillomavirus
LSALQDKILDH

SEQ ID NO: 43901 - protein, 11 aa, Artificial Sequence
  Peptide Derived from Human Papillomavirus
LSERLSALQDK

SEQ ID NO: 43902 - protein, 8 aa, Artificial Sequence
  Peptide Derived from Human Papillomavirus
LTEQHHGR

SEQ ID NO: 43903 - protein, 11 aa, Artificial Sequence
  Peptide Derived from Human Papillomavirus
LTVTYNSEVQR

SEQ ID NO: 43904 - protein, 10 aa, Artificial Sequence
  Peptide Derived from Human Papillomavirus
MALKGLAQSK

SEQ ID NO: 43905 - protein, 11 aa, Artificial Sequence
  Peptide Derived from Human Papillomavirus
MALKGLAQSKY

SEQ ID NO: 43906 - protein, 10 aa, Artificial Sequence
  Peptide Derived from Human Papillomavirus
MNYVVWDSIY

SEQ ID NO: 43907 - protein, 11 aa, Artificial Sequence
  Peptide Derived from Human Papillomavirus
MNYVVWDSIYY

SEQ ID NO: 43908 - protein, 8 aa, Artificial Sequence
  Peptide Derived from Human Papillomavirus
NAILFTAR

SEQ ID NO: 43909 - protein, 10 aa, Artificial Sequence
  Peptide Derived from Human Papillomavirus
NAILFTAREH

SEQ ID NO: 43910 - protein, 8 aa, Artificial Sequence
  Peptide Derived from Human Papillomavirus
NISKSKAH

SEQ ID NO: 43911 - protein, 9 aa, Artificial Sequence
  Peptide Derived from Human Papillomavirus
NISKSKAHK

SEQ ID NO: 43912 - protein, 8 aa, Artificial Sequence
  Peptide Derived from Human Papillomavirus
NSLKCLRY

SEQ ID NO: 43913 - protein, 9 aa, Artificial Sequence
  Peptide Derived from Human Papillomavirus
NSLKCLRYR

SEQ ID NO: 43914 - protein, 11 aa, Artificial Sequence
  Peptide Derived from Human Papillomavirus
NSLKCLRYRLR

SEQ ID NO: 43915 - protein, 9 aa, Artificial Sequence
  Peptide Derived from Human Papillomavirus
NSNTWEVQY

SEQ ID NO: 43916 - protein, 11 aa, Artificial Sequence
  Peptide Derived from Human Papillomavirus
NSQISYWQLIR

SEQ ID NO: 43917 - protein, 9 aa, Artificial Sequence
  Peptide Derived from Human Papillomavirus
NSVQISVGY

SEQ ID NO: 43918 - protein, 9 aa, Artificial Sequence
  Peptide Derived from Human Papillomavirus
NTEPSQCFK

SEQ ID NO: 43919 - protein, 10 aa, Artificial Sequence
  Peptide Derived from Human Papillomavirus
NTEPSQCFKK

SEQ ID NO: 43920 - protein, 9 aa, Artificial Sequence
  Peptide Derived from Human Papillomavirus
NTGILTVTY

SEQ ID NO: 43921 - protein, 9 aa, Artificial Sequence
  Peptide Derived from Human Papillomavirus
NTTPIIHLK

SEQ ID NO: 43922 - protein, 9 aa, Artificial Sequence
  Peptide Derived from Human Papillomavirus
PIIHLKGDK

SEQ ID NO: 43923 - protein, 8 aa, Artificial Sequence
  Peptide Derived from Human Papillomavirus
PINISKSK

SEQ ID NO: 43924 - protein, 10 aa, Artificial Sequence
  Peptide Derived from Human Papillomavirus
PINISKSKAH

SEQ ID NO: 43925 - protein, 11 aa, Artificial Sequence
  Peptide Derived from Human Papillomavirus
PINISKSKAHK

SEQ ID NO: 43926 - protein, 11 aa, Artificial Sequence
  Peptide Derived from Human Papillomavirus
PLLCSSTSNNK

SEQ ID NO: 43927 - protein, 10 aa, Artificial Sequence
  Peptide Derived from Human Papillomavirus
PNSVQISVGY

SEQ ID NO: 43928 - protein, 10 aa, Artificial Sequence
  Peptide Derived from Human Papillomavirus
PSQCFKKGGK

SEQ ID NO: 43929 - protein, 8 aa, Artificial Sequence
  Peptide Derived from Human Papillomavirus
QCFKKGGK

SEQ ID NO: 43930 - protein, 11 aa, Artificial Sequence
  Peptide Derived from Human Papillomavirus
QCFKKGGKTVH

SEQ ID NO: 43931 - protein, 8 aa, Artificial Sequence
  Peptide Derived from Human Papillomavirus
QCGLTEQH

SEQ ID NO: 43932 - protein, 9 aa, Artificial Sequence
  Peptide Derived from Human Papillomavirus
QCGLTEQHH

SEQ ID NO: 43933 - protein, 11 aa, Artificial Sequence
  Peptide Derived from Human Papillomavirus
QCGLTEQHHGR

SEQ ID NO: 43934 - protein, 8 aa, Artificial Sequence
  Peptide Derived from Human Papillomavirus
QDKILDHY

SEQ ID NO: 43935 - protein, 8 aa, Artificial Sequence
  Peptide Derived from Human Papillomavirus
QFKSECEK

SEQ ID NO: 43936 - protein, 9 aa, Artificial Sequence
  Peptide Derived from Human Papillomavirus
QFKSECEKY

SEQ ID NO: 43937 - protein, 9 aa, Artificial Sequence
  Peptide Derived from Human Papillomavirus
QISYWQLIR

SEQ ID NO: 43938 - protein, 8 aa, Artificial Sequence
  Peptide Derived from Human Papillomavirus
QIVRQLQH

SEQ ID NO: 43939 - protein, 11 aa, Artificial Sequence
  Peptide Derived from Human Papillomavirus
QLQHASTSTPK

SEQ ID NO: 43940 - protein, 11 aa, Artificial Sequence
  Peptide Derived from Human Papillomavirus
QMALKGLAQSK

SEQ ID NO: 43941 - protein, 9 aa, Artificial Sequence
  Peptide Derived from Human Papillomavirus
QTPATKRPR

SEQ ID NO: 43942 - protein, 10 aa, Artificial Sequence
  Peptide Derived from Human Papillomavirus
QTPKESLSER

SEQ ID NO: 43943 - protein, 10 aa, Artificial Sequence
  Peptide Derived from Human Papillomavirus
QVVPPINISK

SEQ ID NO: 43944 - protein, 11 aa, Artificial Sequence
  Peptide Derived from Human Papillomavirus
RLENAILFTAR

SEQ ID NO: 43945 - protein, 8 aa, Artificial Sequence
  Peptide Derived from Human Papillomavirus
RLRKYADH

SEQ ID NO: 43946 - protein, 9 aa, Artificial Sequence
  Peptide Derived from Human Papillomavirus
RLRKYADHY

SEQ ID NO: 43947 - protein, 8 aa, Artificial Sequence
  Peptide Derived from Human Papillomavirus
RLSALQDK

SEQ ID NO: 43948 - protein, 10 aa, Artificial Sequence
  Peptide Derived from Human Papillomavirus
SALQDKILDH

SEQ ID NO: 43949 - protein, 11 aa, Artificial Sequence
  Peptide Derived from Human Papillomavirus
SALQDKILDHY

SEQ ID NO: 43950 - protein, 11 aa, Artificial Sequence
  Peptide Derived from Human Papillomavirus
SATQIVRQLQH

SEQ ID NO: 43951 - protein, 9 aa, Artificial Sequence
  Peptide Derived from Human Papillomavirus
SGNTTPIIH

SEQ ID NO: 43952 - protein, 11 aa, Artificial Sequence
  Peptide Derived from Human Papillomavirus
SGNTTPIIHLK

SEQ ID NO: 43953 - protein, 8 aa, Artificial Sequence
  Peptide Derived from Human Papillomavirus
SLKCLRYR

SEQ ID NO: 43954 - protein, 10 aa, Artificial Sequence
  Peptide Derived from Human Papillomavirus
SLKCLRYRLR

SEQ ID NO: 43955 - protein, 11 aa, Artificial Sequence
  Peptide Derived from Human Papillomavirus
SLKCLRYRLRK

SEQ ID NO: 43956 - protein, 8 aa, Artificial Sequence
  Peptide Derived from Human Papillomavirus
SNTWEVQY

SEQ ID NO: 43957 - protein, 8 aa, Artificial Sequence
  Peptide Derived from Human Papillomavirus
SSTSNNKR

SEQ ID NO: 43958 - protein, 9 aa, Artificial Sequence
  Peptide Derived from Human Papillomavirus
SSTSNNKRR

SEQ ID NO: 43959 - protein, 10 aa, Artificial Sequence
  Peptide Derived from Human Papillomavirus
SSTSNNKRRK

SEQ ID NO: 43960 - protein, 11 aa, Artificial Sequence
  Peptide Derived from Human Papillomavirus
SSTWHWTGCNK

SEQ ID NO: 43961 - protein, 8 aa, Artificial Sequence
  Peptide Derived from Human Papillomavirus
STSNNKRR

SEQ ID NO: 43962 - protein, 9 aa, Artificial Sequence
  Peptide Derived from Human Papillomavirus
STSNNKRRK

SEQ ID NO: 43963 - protein, 10 aa, Artificial Sequence
  Peptide Derived from Human Papillomavirus
STWHWTGCNK

SEQ ID NO: 43964 - protein, 8 aa, Artificial Sequence
  Peptide Derived from Human Papillomavirus
SVGTPKPH

SEQ ID NO: 43965 - protein, 8 aa, Artificial Sequence
  Peptide Derived from Human Papillomavirus
SVQISVGY

SEQ ID NO: 43966 - protein, 11 aa, Artificial Sequence
  Peptide Derived from Human Papillomavirus
TAACVSYWGVY

SEQ ID NO: 43967 - protein, 9 aa, Artificial Sequence
  Peptide Derived from Human Papillomavirus
TAREHGITK

SEQ ID NO: 43968 - protein, 8 aa, Artificial Sequence
  Peptide Derived from Human Papillomavirus
TASVGTPK

SEQ ID NO: 43969 - protein, 10 aa, Artificial Sequence
  Peptide Derived from Human Papillomavirus
TASVGTPKPH

SEQ ID NO: 43970 - protein, 8 aa, Artificial Sequence
  Peptide Derived from Human Papillomavirus
TGILTVTY

SEQ ID NO: 43971 - protein, 8 aa, Artificial Sequence
  Peptide Derived from Human Papillomavirus
TSNNKRRK

SEQ ID NO: 43972 - protein, 8 aa, Artificial Sequence
  Peptide Derived from Human Papillomavirus
TTPIIHLK

SEQ ID NO: 43973 - protein, 11 aa, Artificial Sequence
  Peptide Derived from Human Papillomavirus
TTPIIHLKGDK

SEQ ID NO: 43974 - protein, 8 aa, Artificial Sequence
  Peptide Derived from Human Papillomavirus
TTYYVQFK

SEQ ID NO: 43975 - protein, 10 aa, Artificial Sequence
  Peptide Derived from Human Papillomavirus
TVHVYFDGNK

SEQ ID NO: 43976 - protein, 9 aa, Artificial Sequence
  Peptide Derived from Human Papillomavirus
TVSATQIVR

SEQ ID NO: 43977 - protein, 10 aa, Artificial Sequence
  Peptide Derived from Human Papillomavirus
TVTYNSEVQR

SEQ ID NO: 43978 - protein, 11 aa, Artificial Sequence
  Peptide Derived from Human Papillomavirus
VCSGNTTPIIH

SEQ ID NO: 43979 - protein, 8 aa, Artificial Sequence
  Peptide Derived from Human Papillomavirus
VSATQIVR

SEQ ID NO: 43980 - protein, 8 aa, Artificial Sequence
  Peptide Derived from Human Papillomavirus
VSYWGVYY

SEQ ID NO: 43981 - protein, 10 aa, Artificial Sequence
  Peptide Derived from Human Papillomavirus
VSYWGVYYIK

SEQ ID NO: 43982 - protein, 9 aa, Artificial Sequence
  Peptide Derived from Human Papillomavirus
VTYNSEVQR

SEQ ID NO: 43983 - protein, 9 aa, Artificial Sequence
  Peptide Derived from Human Papillomavirus
VVPPINISK

SEQ ID NO: 43984 - protein, 11 aa, Artificial Sequence
  Peptide Derived from Human Papillomavirus
VVPPINISKSK

SEQ ID NO: 43985 - protein, 8 aa, Artificial Sequence
  Peptide Derived from Human Papillomavirus
VVWDSIYY

SEQ ID NO: 43986 - protein, 10 aa, Artificial Sequence
  Peptide Derived from Human Papillomavirus
WDKTAACVSY

SEQ ID NO: 43987 - protein, 10 aa, Artificial Sequence
  Peptide Derived from Human Papillomavirus
WNTEPSQCFK

SEQ ID NO: 43988 - protein, 11 aa, Artificial Sequence
  Peptide Derived from Human Papillomavirus
WNTEPSQCFKK

SEQ ID NO: 43989 - protein, 11 aa, Artificial Sequence
  Peptide Derived from Human Papillomavirus
YGNSNTWEVQY

SEQ ID NO: 43990 - protein, 9 aa, Artificial Sequence
  Peptide Derived from Human Papillomavirus
YIKDGDTTY

SEQ ID NO: 43991 - protein, 10 aa, Artificial Sequence
  Peptide Derived from Human Papillomavirus
YIKDGDTTYY

SEQ ID NO: 43992 - protein, 10 aa, Artificial Sequence
  Peptide Derived from Human Papillomavirus
YITETGIWDK

SEQ ID NO: 43993 - protein, 9 aa, Artificial Sequence
  Peptide Derived from Human Papillomavirus
YSEISSTWH

SEQ ID NO: 43994 - protein, 10 aa, Artificial Sequence
  Peptide Derived from Human Papillomavirus
YVQFKSECEK

SEQ ID NO: 43995 - protein, 11 aa, Artificial Sequence
  Peptide Derived from Human Papillomavirus
YVQFKSECEKY

SEQ ID NO: 43996 - protein, 8 aa, Artificial Sequence
  Peptide Derived from Human Papillomavirus
YVVWDSIY

SEQ ID NO: 43997 - protein, 9 aa, Artificial Sequence
  Peptide Derived from Human Papillomavirus
YVVWDSIYY

SEQ ID NO: 43998 - protein, 10 aa, Artificial Sequence
  Peptide Derived from Human Papillomavirus
AACHKCIDFY

SEQ ID NO: 43999 - protein, 9 aa, Artificial Sequence
  Peptide Derived from Human Papillomavirus
ACHKCIDFY

SEQ ID NO: 44000 - protein, 11 aa, Artificial Sequence
  Peptide Derived from Human Papillomavirus
ACHKCIDFYSR

SEQ ID NO: 44001 - protein, 11 aa, Artificial Sequence
  Peptide Derived from Human Papillomavirus
ACVYCKATLER

SEQ ID NO: 44002 - protein, 9 aa, Artificial Sequence
  Peptide Derived from Human Papillomavirus
AFKDLFIVY

SEQ ID NO: 44003 - protein, 10 aa, Artificial Sequence
  Peptide Derived from Human Papillomavirus
AFKDLFIVYR

SEQ ID NO: 44004 - protein, 9 aa, Artificial Sequence
  Peptide Derived from Human Papillomavirus
ATLERTEVY

SEQ ID NO: 44005 - protein, 9 aa, Artificial Sequence
  Peptide Derived from Human Papillomavirus
CCDQARQER

SEQ ID NO: 44006 - protein, 11 aa, Artificial Sequence
  Peptide Derived from Human Papillomavirus
CCDQARQERLR

SEQ ID NO: 44007 - protein, 8 aa, Artificial Sequence
  Peptide Derived from Human Papillomavirus
CDQARQER

SEQ ID NO: 44008 - protein, 10 aa, Artificial Sequence
  Peptide Derived from Human Papillomavirus
CDQARQERLR

SEQ ID NO: 44009 - protein, 11 aa, Artificial Sequence
  Peptide Derived from Human Papillomavirus
CDQARQERLRR

SEQ ID NO: 44010 - protein, 8 aa, Artificial Sequence
  Peptide Derived from Human Papillomavirus
CIAYAACH

SEQ ID NO: 44011 - protein, 9 aa, Artificial Sequence
  Peptide Derived from Human Papillomavirus
CIAYAACHK

SEQ ID NO: 44012 - protein, 9 aa, Artificial Sequence
  Peptide Derived from Human Papillomavirus
CIDFYSRIR

SEQ ID NO: 44013 - protein, 9 aa, Artificial Sequence
  Peptide Derived from Human Papillomavirus
CNTCCDQAR

SEQ ID NO: 44014 - protein, 10 aa, Artificial Sequence
  Peptide Derived from Human Papillomavirus
CVYCKATLER

SEQ ID NO: 44015 - protein, 9 aa, Artificial Sequence
  Peptide Derived from Human Papillomavirus
DCIAYAACH

SEQ ID NO: 44016 - protein, 10 aa, Artificial Sequence
  Peptide Derived from Human Papillomavirus
DCIAYAACHK

SEQ ID NO: 44017 - protein, 8 aa, Artificial Sequence
  Peptide Derived from Human Papillomavirus
DDPTQRPY

SEQ ID NO: 44018 - protein, 9 aa, Artificial Sequence
  Peptide Derived from Human Papillomavirus
DDPTQRPYK

SEQ ID NO: 44019 - protein, 10 aa, Artificial Sequence
  Peptide Derived from Human Papillomavirus
DFYSRIRELR

SEQ ID NO: 44020 - protein, 11 aa, Artificial Sequence
  Peptide Derived from Human Papillomavirus
DFYSRIRELRY

SEQ ID NO: 44021 - protein, 8 aa, Artificial Sequence
  Peptide Derived from Human Papillomavirus
DVSIACVY

SEQ ID NO: 44022 - protein, 10 aa, Artificial Sequence
  Peptide Derived from Human Papillomavirus
DVSIACVYCK

SEQ ID NO: 44023 - protein, 10 aa, Artificial Sequence
  Peptide Derived from Human Papillomavirus
ELRYYSNSVY

SEQ ID NO: 44024 - protein, 8 aa, Artificial Sequence
  Peptide Derived from Human Papillomavirus
ELYNLLIR

SEQ ID NO: 44025 - protein, 11 aa, Artificial Sequence
  Peptide Derived from Human Papillomavirus
ELYNLLIRCLR

SEQ ID NO: 44026 - protein, 8 aa, Artificial Sequence
  Peptide Derived from Human Papillomavirus
EVYQFAFK

SEQ ID NO: 44027 - protein, 10 aa, Artificial Sequence
  Peptide Derived from Human Papillomavirus
FAFKDLFIVY

SEQ ID NO: 44028 - protein, 11 aa, Artificial Sequence
  Peptide Derived from Human Papillomavirus
FAFKDLFIVYR

SEQ ID NO: 44029 - protein, 9 aa, Artificial Sequence
  Peptide Derived from Human Papillomavirus
FDDPTQRPY

SEQ ID NO: 44030 - protein, 10 aa, Artificial Sequence
  Peptide Derived from Human Papillomavirus
FDDPTQRPYK

SEQ ID NO: 44031 - protein, 10 aa, Artificial Sequence
  Peptide Derived from Human Papillomavirus
FIVYRDCIAY

SEQ ID NO: 44032 - protein, 9 aa, Artificial Sequence
  Peptide Derived from Human Papillomavirus
HLKDKRRFH

SEQ ID NO: 44033 - protein, 8 aa, Artificial Sequence
  Peptide Derived from Human Papillomavirus
HSIAGQYR

SEQ ID NO: 44034 - protein, 8 aa, Artificial Sequence
  Peptide Derived from Human Papillomavirus
IAYAACHK

SEQ ID NO: 44035 - protein, 8 aa, Artificial Sequence
  Peptide Derived from Human Papillomavirus
IDFYSRIR

SEQ ID NO: 44036 - protein, 11 aa, Artificial Sequence
  Peptide Derived from Human Papillomavirus
IDFYSRIRELR

SEQ ID NO: 44037 - protein, 9 aa, Artificial Sequence
  Peptide Derived from Human Papillomavirus
IVYRDCIAY

SEQ ID NO: 44038 - protein, 10 aa, Artificial Sequence
  Peptide Derived from Human Papillomavirus
KATLERTEVY

SEQ ID NO: 44039 - protein, 8 aa, Artificial Sequence
  Peptide Derived from Human Papillomavirus
KCIDFYSR

SEQ ID NO: 44040 - protein, 10 aa, Artificial Sequence
  Peptide Derived from Human Papillomavirus
KCIDFYSRIR

SEQ ID NO: 44041 - protein, 8 aa, Artificial Sequence
  Peptide Derived from Human Papillomavirus
KDLFIVYR

SEQ ID NO: 44042 - protein, 8 aa, Artificial Sequence
  Peptide Derived from Human Papillomavirus
KITNTELY

SEQ ID NO: 44043 - protein, 11 aa, Artificial Sequence
  Peptide Derived from Human Papillomavirus
LFIVYRDCIAY

SEQ ID NO: 44044 - protein, 9 aa, Artificial Sequence
  Peptide Derived from Human Papillomavirus
LIRCLRCQK

SEQ ID NO: 44045 - protein, 10 aa, Artificial Sequence
  Peptide Derived from Human Papillomavirus
LLIRCLRCQK

SEQ ID NO: 44046 - protein, 8 aa, Artificial Sequence
  Peptide Derived from Human Papillomavirus
LNPAEKRR

SEQ ID NO: 44047 - protein, 9 aa, Artificial Sequence
  Peptide Derived from Human Papillomavirus
LNPAEKRRH

SEQ ID NO: 44048 - protein, 11 aa, Artificial Sequence
  Peptide Derived from Human Papillomavirus
LNPAEKRRHLK

SEQ ID NO: 44049 - protein, 10 aa, Artificial Sequence
  Peptide Derived from Human Papillomavirus
MARFDDPTQR

SEQ ID NO: 44050 - protein, 8 aa, Artificial Sequence
  Peptide Derived from Human Papillomavirus
NLLIRCLR

SEQ ID NO: 44051 - protein, 11 aa, Artificial Sequence
  Peptide Derived from Human Papillomavirus
NLLIRCLRCQK

SEQ ID NO: 44052 - protein, 10 aa, Artificial Sequence
  Peptide Derived from Human Papillomavirus
NSVYGETLEK

SEQ ID NO: 44053 - protein, 8 aa, Artificial Sequence
  Peptide Derived from Human Papillomavirus
NTCCDQAR

SEQ ID NO: 44054 - protein, 11 aa, Artificial Sequence
  Peptide Derived from Human Papillomavirus
NTCCDQARQER

SEQ ID NO: 44055 - protein, 10 aa, Artificial Sequence
  Peptide Derived from Human Papillomavirus
NTELYNLLIR

SEQ ID NO: 44056 - protein, 9 aa, Artificial Sequence
  Peptide Derived from Human Papillomavirus
PAEKRRHLK

SEQ ID NO: 44057 - protein, 11 aa, Artificial Sequence
  Peptide Derived from Human Papillomavirus
PAEKRRHLKDK

SEQ ID NO: 44058 - protein, 8 aa, Artificial Sequence
  Peptide Derived from Human Papillomavirus
PLNPAEKR

SEQ ID NO: 44059 - protein, 9 aa, Artificial Sequence
  Peptide Derived from Human Papillomavirus
PLNPAEKRR

SEQ ID NO: 44060 - protein, 10 aa, Artificial Sequence
  Peptide Derived from Human Papillomavirus
PLNPAEKRRH

SEQ ID NO: 44061 - protein, 8 aa, Artificial Sequence
  Peptide Derived from Human Papillomavirus
QARQERLR

SEQ ID NO: 44062 - protein, 9 aa, Artificial Sequence
  Peptide Derived from Human Papillomavirus
QARQERLRR

SEQ ID NO: 44063 - protein, 10 aa, Artificial Sequence
  Peptide Derived from Human Papillomavirus
QARQERLRRR

SEQ ID NO: 44064 - protein, 11 aa, Artificial Sequence
  Peptide Derived from Human Papillomavirus
QARQERLRRRR

SEQ ID NO: 44065 - protein, 10 aa, Artificial Sequence
  Peptide Derived from Human Papillomavirus
QCNTCCDQAR

SEQ ID NO: 44066 - protein, 9 aa, Artificial Sequence
  Peptide Derived from Human Papillomavirus
QDVSIACVY

SEQ ID NO: 44067 - protein, 11 aa, Artificial Sequence
  Peptide Derived from Human Papillomavirus
QDVSIACVYCK

SEQ ID NO: 44068 - protein, 11 aa, Artificial Sequence
  Peptide Derived from Human Papillomavirus
QFAFKDLFIVY

SEQ ID NO: 44069 - protein, 11 aa, Artificial Sequence
  Peptide Derived from Human Papillomavirus
RCQKPLNPAEK

SEQ ID NO: 44070 - protein, 10 aa, Artificial Sequence
  Peptide Derived from Human Papillomavirus
RDCIAYAACH

SEQ ID NO: 44071 - protein, 11 aa, Artificial Sequence
  Peptide Derived from Human Papillomavirus
RDCIAYAACHK

SEQ ID NO: 44072 - protein, 8 aa, Artificial Sequence
  Peptide Derived from Human Papillomavirus
RFDDPTQR

SEQ ID NO: 44073 - protein, 10 aa, Artificial Sequence
  Peptide Derived from Human Papillomavirus
RFDDPTQRPY

SEQ ID NO: 44074 - protein, 11 aa, Artificial Sequence
  Peptide Derived from Human Papillomavirus
RFDDPTQRPYK

SEQ ID NO: 44075 - protein, 9 aa, Artificial Sequence
  Peptide Derived from Human Papillomavirus
RFHSIAGQY

SEQ ID NO: 44076 - protein, 10 aa, Artificial Sequence
  Peptide Derived from Human Papillomavirus
RFHSIAGQYR

SEQ ID NO: 44077 - protein, 8 aa, Artificial Sequence
  Peptide Derived from Human Papillomavirus
RIRELRYY

SEQ ID NO: 44078 - protein, 10 aa, Artificial Sequence
  Peptide Derived from Human Papillomavirus
RTEVYQFAFK

SEQ ID NO: 44079 - protein, 8 aa, Artificial Sequence
  Peptide Derived from Human Papillomavirus
SIACVYCK

SEQ ID NO: 44080 - protein, 11 aa, Artificial Sequence
  Peptide Derived from Human Papillomavirus
SLQDVSIACVY

SEQ ID NO: 44081 - protein, 11 aa, Artificial Sequence
  Peptide Derived from Human Papillomavirus
SNSVYGETLEK

SEQ ID NO: 44082 - protein, 9 aa, Artificial Sequence
  Peptide Derived from Human Papillomavirus
SVYGETLEK

SEQ ID NO: 44083 - protein, 10 aa, Artificial Sequence
  Peptide Derived from Human Papillomavirus
TCCDQARQER

SEQ ID NO: 44084 - protein, 11 aa, Artificial Sequence
  Peptide Derived from Human Papillomavirus
TLEKITNTELY

SEQ ID NO: 44085 - protein, 8 aa, Artificial Sequence
  Peptide Derived from Human Papillomavirus
TLERTEVY

SEQ ID NO: 44086 - protein, 11 aa, Artificial Sequence
  Peptide Derived from Human Papillomavirus
TNTELYNLLIR

SEQ ID NO: 44087 - protein, 9 aa, Artificial Sequence
  Peptide Derived from Human Papillomavirus
VSIACVYCK

SEQ ID NO: 44088 - protein, 11 aa, Artificial Sequence
  Peptide Derived from Human Papillomavirus
YAACHKCIDFY

SEQ ID NO: 44089 - protein, 8 aa, Artificial Sequence
  Peptide Derived from Human Papillomavirus
YCKATLER

SEQ ID NO: 44090 - protein, 9 aa, Artificial Sequence
  Peptide Derived from Human Papillomavirus
YNLLIRCLR

SEQ ID NO: 44091 - protein, 8 aa, Artificial Sequence
  Peptide Derived from Human Papillomavirus
YSRIRELR

SEQ ID NO: 44092 - protein, 9 aa, Artificial Sequence
  Peptide Derived from Human Papillomavirus
YSRIRELRY

SEQ ID NO: 44093 - protein, 10 aa, Artificial Sequence
  Peptide Derived from Human Papillomavirus
YSRIRELRYY

SEQ ID NO: 44094 - protein, 9 aa, Artificial Sequence
  Peptide Derived from Human Papillomavirus
ATLQEIVLH

SEQ ID NO: 44095 - protein, 9 aa, Artificial Sequence
  Peptide Derived from Human Papillomavirus
CVCCKCDGR

SEQ ID NO: 44096 - protein, 11 aa, Artificial Sequence
  Peptide Derived from Human Papillomavirus
DGVSHAQLPAR

SEQ ID NO: 44097 - protein, 10 aa, Artificial Sequence
  Peptide Derived from Human Papillomavirus
ELDPVDLLCY

SEQ ID NO: 44098 - protein, 10 aa, Artificial Sequence
  Peptide Derived from Human Papillomavirus
ENDEADGVSH

SEQ ID NO: 44099 - protein, 8 aa, Artificial Sequence
  Peptide Derived from Human Papillomavirus
ESSADDLR

SEQ ID NO: 44100 - protein, 10 aa, Artificial Sequence
  Peptide Derived from Human Papillomavirus
GVSHAQLPAR

SEQ ID NO: 44101 - protein, 11 aa, Artificial Sequence
  Peptide Derived from Human Papillomavirus
GVSHAQLPARR

SEQ ID NO: 44102 - protein, 8 aa, Artificial Sequence
  Peptide Derived from Human Papillomavirus
HAQLPARR

SEQ ID NO: 44103 - protein, 11 aa, Artificial Sequence
  Peptide Derived from Human Papillomavirus
ILCVCCKCDGR

SEQ ID NO: 44104 - protein, 8 aa, Artificial Sequence
  Peptide Derived from Human Papillomavirus
KILCVCCK

SEQ ID NO: 44105 - protein, 10 aa, Artificial Sequence
  Peptide Derived from Human Papillomavirus
LCVCCKCDGR

SEQ ID NO: 44106 - protein, 9 aa, Artificial Sequence
  Peptide Derived from Human Papillomavirus
LDPVDLLCY

SEQ ID NO: 44107 - protein, 11 aa, Artificial Sequence
  Peptide Derived from Human Papillomavirus
LTVESSADDLR

SEQ ID NO: 44108 - protein, 9 aa, Artificial Sequence
  Peptide Derived from Human Papillomavirus
NDEADGVSH

SEQ ID NO: 44109 - protein, 9 aa, Artificial Sequence
  Peptide Derived from Human Papillomavirus
PARRAEPQR

SEQ ID NO: 44110 - protein, 10 aa, Artificial Sequence
  Peptide Derived from Human Papillomavirus
PARRAEPQRH

SEQ ID NO: 44111 - protein, 11 aa, Artificial Sequence
  Peptide Derived from Human Papillomavirus
PARRAEPQRHK

SEQ ID NO: 44112 - protein, 11 aa, Artificial Sequence
  Peptide Derived from Human Papillomavirus
QLPARRAEPQR

SEQ ID NO: 44113 - protein, 8 aa, Artificial Sequence
  Peptide Derived from Human Papillomavirus
RAEPQRHK

SEQ ID NO: 44114 - protein, 10 aa, Artificial Sequence
  Peptide Derived from Human Papillomavirus
RATLQEIVLH

SEQ ID NO: 44115 - protein, 8 aa, Artificial Sequence
  Peptide Derived from Human Papillomavirus
TLQEIVLH

SEQ ID NO: 44116 - protein, 10 aa, Artificial Sequence
  Peptide Derived from Human Papillomavirus
TVESSADDLR

SEQ ID NO: 44117 - protein, 8 aa, Artificial Sequence
  Peptide Derived from Human Papillomavirus
VCCKCDGR

SEQ ID NO: 44118 - protein, 9 aa, Artificial Sequence
  Peptide Derived from Human Papillomavirus
VSHAQLPAR

SEQ ID NO: 44119 - protein, 10 aa, Artificial Sequence
  Peptide Derived from Human Papillomavirus
VSHAQLPARR

SEQ ID NO: 44120 - protein, 9 aa, Artificial Sequence
  Peptide Derived from Human Papillomavirus
AASTSTASR

SEQ ID NO: 44121 - protein, 11 aa, Artificial Sequence
  Peptide Derived from Human Papillomavirus
AATAVITQDVR

SEQ ID NO: 44122 - protein, 9 aa, Artificial Sequence
  Peptide Derived from Human Papillomavirus
ACVGMEIGR

SEQ ID NO: 44123 - protein, 9 aa, Artificial Sequence
  Peptide Derived from Human Papillomavirus
AGNKQAVPK

SEQ ID NO: 44124 - protein, 8 aa, Artificial Sequence
  Peptide Derived from Human Papillomavirus
AIGEHWAK

SEQ ID NO: 44125 - protein, 11 aa, Artificial Sequence
  Peptide Derived from Human Papillomavirus
ALWRPSDSTVY

SEQ ID NO: 44126 - protein, 11 aa, Artificial Sequence
  Peptide Derived from Human Papillomavirus
AMDFSTLQDTK

SEQ ID NO: 44127 - protein, 9 aa, Artificial Sequence
  Peptide Derived from Human Papillomavirus
ASRPAKRVR

SEQ ID NO: 44128 - protein, 11 aa, Artificial Sequence
  Peptide Derived from Human Papillomavirus
ASRPAKRVRIR

SEQ ID NO: 44129 - protein, 11 aa, Artificial Sequence
  Peptide Derived from Human Papillomavirus
ASTQNPVPNTY

SEQ ID NO: 44130 - protein, 8 aa, Artificial Sequence
  Peptide Derived from Human Papillomavirus
ASTSTASR

SEQ ID NO: 44131 - protein, 11 aa, Artificial Sequence
  Peptide Derived from Human Papillomavirus
ASTSTASRPAK

SEQ ID NO: 44132 - protein, 10 aa, Artificial Sequence
  Peptide Derived from Human Papillomavirus
ATAVITQDVR

SEQ ID NO: 44133 - protein, 8 aa, Artificial Sequence
  Peptide Derived from Human Papillomavirus
AVITQDVR

SEQ ID NO: 44134 - protein, 8 aa, Artificial Sequence
  Peptide Derived from Human Papillomavirus
AVPKVSAY

SEQ ID NO: 44135 - protein, 10 aa, Artificial Sequence
  Peptide Derived from Human Papillomavirus
AVPKVSAYQY

SEQ ID NO: 44136 - protein, 11 aa, Artificial Sequence
  Peptide Derived from Human Papillomavirus
AVPKVSAYQYR

SEQ ID NO: 44137 - protein, 10 aa, Artificial Sequence
  Peptide Derived from Human Papillomavirus
CLRREQLFAR

SEQ ID NO: 44138 - protein, 11 aa, Artificial Sequence
  Peptide Derived from Human Papillomavirus
CLRREQLFARH

SEQ ID NO: 44139 - protein, 8 aa, Artificial Sequence
  Peptide Derived from Human Papillomavirus
CVGMEIGR

SEQ ID NO: 44140 - protein, 8 aa, Artificial Sequence
  Peptide Derived from Human Papillomavirus
CVPAIGEH

SEQ ID NO: 44141 - protein, 11 aa, Artificial Sequence
  Peptide Derived from Human Papillomavirus
CVPAIGEHWAK

SEQ ID NO: 44142 - protein, 8 aa, Artificial Sequence
  Peptide Derived from Human Papillomavirus
DCPPLELK

SEQ ID NO: 44143 - protein, 11 aa, Artificial Sequence
  Peptide Derived from Human Papillomavirus
DDYVSRTSIFY

SEQ ID NO: 44144 - protein, 9 aa, Artificial Sequence
  Peptide Derived from Human Papillomavirus
DFSTLQDTK

SEQ ID NO: 44145 - protein, 9 aa, Artificial Sequence
  Peptide Derived from Human Papillomavirus
DGDMVDTGY

SEQ ID NO: 44146 - protein, 8 aa, Artificial Sequence
  Peptide Derived from Human Papillomavirus
DICQSICK

SEQ ID NO: 44147 - protein, 9 aa, Artificial Sequence
  Peptide Derived from Human Papillomavirus
DICQSICKY

SEQ ID NO: 44148 - protein, 9 aa, Artificial Sequence
  Peptide Derived from Human Papillomavirus
DLDQYPLGR

SEQ ID NO: 44149 - protein, 10 aa, Artificial Sequence
  Peptide Derived from Human Papillomavirus
DLDQYPLGRK

SEQ ID NO: 44150 - protein, 8 aa, Artificial Sequence
  Peptide Derived from Human Papillomavirus
DNVSVDYK

SEQ ID NO: 44151 - protein, 8 aa, Artificial Sequence
  Peptide Derived from Human Papillomavirus
DSMFFCLR

SEQ ID NO: 44152 - protein, 9 aa, Artificial Sequence
  Peptide Derived from Human Papillomavirus
DSMFFCLRR

SEQ ID NO: 44153 - protein, 9 aa, Artificial Sequence
  Peptide Derived from Human Papillomavirus
DSQLFNKPY

SEQ ID NO: 44154 - protein, 11 aa, Artificial Sequence
  Peptide Derived from Human Papillomavirus
DSTIYNPETQR

SEQ ID NO: 44155 - protein, 11 aa, Artificial Sequence
  Peptide Derived from Human Papillomavirus
DTTPPEKQDPY

SEQ ID NO: 44156 - protein, 8 aa, Artificial Sequence
  Peptide Derived from Human Papillomavirus
DTVPTDLY

SEQ ID NO: 44157 - protein, 10 aa, Artificial Sequence
  Peptide Derived from Human Papillomavirus
DTVPTDLYIK

SEQ ID NO: 44158 - protein, 10 aa, Artificial Sequence
  Peptide Derived from Human Papillomavirus
DVRDNVSVDY

SEQ ID NO: 44159 - protein, 11 aa, Artificial Sequence
  Peptide Derived from Human Papillomavirus
DVRDNVSVDYK

SEQ ID NO: 44160 - protein, 10 aa, Artificial Sequence
  Peptide Derived from Human Papillomavirus
EDGDMVDTGY

SEQ ID NO: 44161 - protein, 8 aa, Artificial Sequence
  Peptide Derived from Human Papillomavirus
ETPGSCVY

SEQ ID NO: 44162 - protein, 8 aa, Artificial Sequence
  Peptide Derived from Human Papillomavirus
FARHFWNR

SEQ ID NO: 44163 - protein, 11 aa, Artificial Sequence
  Peptide Derived from Human Papillomavirus
FCLRREQLFAR

SEQ ID NO: 44164 - protein, 9 aa, Artificial Sequence
  Peptide Derived from Human Papillomavirus
FGLPDSTIY

SEQ ID NO: 44165 - protein, 8 aa, Artificial Sequence
  Peptide Derived from Human Papillomavirus
FLQMALWR

SEQ ID NO: 44166 - protein, 8 aa, Artificial Sequence
  Peptide Derived from Human Papillomavirus
FLVQAGLR

SEQ ID NO: 44167 - protein, 9 aa, Artificial Sequence
  Peptide Derived from Human Papillomavirus
FLVQAGLRR

SEQ ID NO: 44168 - protein, 10 aa, Artificial Sequence
  Peptide Derived from Human Papillomavirus
FLVQAGLRRR

SEQ ID NO: 44169 - protein, 8 aa, Artificial Sequence
  Peptide Derived from Human Papillomavirus
FNKPYWLH

SEQ ID NO: 44170 - protein, 9 aa, Artificial Sequence
  Peptide Derived from Human Papillomavirus
FNKPYWLHK

SEQ ID NO: 44171 - protein, 8 aa, Artificial Sequence
  Peptide Derived from Human Papillomavirus
FSSDLDQY

SEQ ID NO: 44172 - protein, 8 aa, Artificial Sequence
  Peptide Derived from Human Papillomavirus
FSTLQDTK

SEQ ID NO: 44173 - protein, 11 aa, Artificial Sequence
  Peptide Derived from Human Papillomavirus
FVQSVAVTCQK

SEQ ID NO: 44174 - protein, 9 aa, Artificial Sequence
  Peptide Derived from Human Papillomavirus
FVTVVDTTR

SEQ ID NO: 44175 - protein, 10 aa, Artificial Sequence
  Peptide Derived from Human Papillomavirus
GAGNKQAVPK

SEQ ID NO: 44176 - protein, 9 aa, Artificial Sequence
  Peptide Derived from Human Papillomavirus
GCVPAIGEH

SEQ ID NO: 44177 - protein, 9 aa, Artificial Sequence
  Peptide Derived from Human Papillomavirus
GDCPPLELK

SEQ ID NO: 44178 - protein, 8 aa, Artificial Sequence
  Peptide Derived from Human Papillomavirus
GDMVDTGY

SEQ ID NO: 44179 - protein, 9 aa, Artificial Sequence
  Peptide Derived from Human Papillomavirus
GDSMFFCLR

SEQ ID NO: 44180 - protein, 10 aa, Artificial Sequence
  Peptide Derived from Human Papillomavirus
GDSMFFCLRR

SEQ ID NO: 44181 - protein, 9 aa, Artificial Sequence
  Peptide Derived from Human Papillomavirus
GDTVPTDLY

SEQ ID NO: 44182 - protein, 11 aa, Artificial Sequence
  Peptide Derived from Human Papillomavirus
GDTVPTDLYIK

SEQ ID NO: 44183 - protein, 10 aa, Artificial Sequence
  Peptide Derived from Human Papillomavirus
GIGLSGHPFY

SEQ ID NO: 44184 - protein, 8 aa, Artificial Sequence
  Peptide Derived from Human Papillomavirus
GLPDSTIY

SEQ ID NO: 44185 - protein, 11 aa, Artificial Sequence
  Peptide Derived from Human Papillomavirus
GLRRRPTIGPR

SEQ ID NO: 44186 - protein, 8 aa, Artificial Sequence
  Peptide Derived from Human Papillomavirus
GLSGHPFY

SEQ ID NO: 44187 - protein, 10 aa, Artificial Sequence
  Peptide Derived from Human Papillomavirus
GLSGHPFYNK

SEQ ID NO: 44188 - protein, 8 aa, Artificial Sequence
  Peptide Derived from Human Papillomavirus
GNKQAVPK

SEQ ID NO: 44189 - protein, 8 aa, Artificial Sequence
  Peptide Derived from Human Papillomavirus
HGIIIFLK

SEQ ID NO: 44190 - protein, 8 aa, Artificial Sequence
  Peptide Derived from Human Papillomavirus
HNNGICWH

SEQ ID NO: 44191 - protein, 8 aa, Artificial Sequence
  Peptide Derived from Human Papillomavirus
ICQSICKY

SEQ ID NO: 44192 - protein, 11 aa, Artificial Sequence
  Peptide Derived from Human Papillomavirus
ICQSICKYPDY

SEQ ID NO: 44193 - protein, 9 aa, Artificial Sequence
  Peptide Derived from Human Papillomavirus
IFLQMALWR

SEQ ID NO: 44194 - protein, 9 aa, Artificial Sequence
  Peptide Derived from Human Papillomavirus
IFYHAGSSR

SEQ ID NO: 44195 - protein, 9 aa, Artificial Sequence
  Peptide Derived from Human Papillomavirus
IGLSGHPFY

SEQ ID NO: 44196 - protein, 11 aa, Artificial Sequence
  Peptide Derived from Human Papillomavirus
IGLSGHPFYNK

SEQ ID NO: 44197 - protein, 11 aa, Artificial Sequence
  Peptide Derived from Human Papillomavirus
ILGCVPAIGEH

SEQ ID NO: 44198 - protein, 10 aa, Artificial Sequence
  Peptide Derived from Human Papillomavirus
ITLTAEVMSY

SEQ ID NO: 44199 - protein, 11 aa, Artificial Sequence
  Peptide Derived from Human Papillomavirus
ITTSDSQLFNK

SEQ ID NO: 44200 - protein, 8 aa, Artificial Sequence
  Peptide Derived from Human Papillomavirus
KDTTPPEK

SEQ ID NO: 44201 - protein, 10 aa, Artificial Sequence
  Peptide Derived from Human Papillomavirus
KFGLPDSTIY

SEQ ID NO: 44202 - protein, 8 aa, Artificial Sequence
  Peptide Derived from Human Papillomavirus
KFKHYSRH

SEQ ID NO: 44203 - protein, 9 aa, Artificial Sequence
  Peptide Derived from Human Papillomavirus
KFLVQAGLR

SEQ ID NO: 44204 - protein, 10 aa, Artificial Sequence
  Peptide Derived from Human Papillomavirus
KFLVQAGLRR

SEQ ID NO: 44205 - protein, 11 aa, Artificial Sequence
  Peptide Derived from Human Papillomavirus
KFLVQAGLRRR

SEQ ID NO: 44206 - protein, 9 aa, Artificial Sequence
  Peptide Derived from Human Papillomavirus
KFSSDLDQY

SEQ ID NO: 44207 - protein, 8 aa, Artificial Sequence
  Peptide Derived from Human Papillomavirus
KFWTVDLK

SEQ ID NO: 44208 - protein, 10 aa, Artificial Sequence
  Peptide Derived from Human Papillomavirus
KFWTVDLKEK

SEQ ID NO: 44209 - protein, 8 aa, Artificial Sequence
  Peptide Derived from Human Papillomavirus
KGTSANMR

SEQ ID NO: 44210 - protein, 9 aa, Artificial Sequence
  Peptide Derived from Human Papillomavirus
KLDDTESAH

SEQ ID NO: 44211 - protein, 10 aa, Artificial Sequence
  Peptide Derived from Human Papillomavirus
KLKFWTVDLK

SEQ ID NO: 44212 - protein, 8 aa, Artificial Sequence
  Peptide Derived from Human Papillomavirus
KVSAYQYR

SEQ ID NO: 44213 - protein, 11 aa, Artificial Sequence
  Peptide Derived from Human Papillomavirus
KVSAYQYRVFR

SEQ ID NO: 44214 - protein, 8 aa, Artificial Sequence
  Peptide Derived from Human Papillomavirus
LDDTESAH

SEQ ID NO: 44215 - protein, 9 aa, Artificial Sequence
  Peptide Derived from Human Papillomavirus
LDICQSICK

SEQ ID NO: 44216 - protein, 10 aa, Artificial Sequence
  Peptide Derived from Human Papillomavirus
LDICQSICKY

SEQ ID NO: 44217 - protein, 8 aa, Artificial Sequence
  Peptide Derived from Human Papillomavirus
LDQYPLGR

SEQ ID NO: 44218 - protein, 9 aa, Artificial Sequence
  Peptide Derived from Human Papillomavirus
LDQYPLGRK

SEQ ID NO: 44219 - protein, 9 aa, Artificial Sequence
  Peptide Derived from Human Papillomavirus
LFARHFWNR

SEQ ID NO: 44220 - protein, 9 aa, Artificial Sequence
  Peptide Derived from Human Papillomavirus
LFNKPYWLH

SEQ ID NO: 44221 - protein, 10 aa, Artificial Sequence
  Peptide Derived from Human Papillomavirus
LFNKPYWLHK

SEQ ID NO: 44222 - protein, 10 aa, Artificial Sequence
  Peptide Derived from Human Papillomavirus
LFVTVVDTTR

SEQ ID NO: 44223 - protein, 10 aa, Artificial Sequence
  Peptide Derived from Human Papillomavirus
LGCVPAIGEH

SEQ ID NO: 44224 - protein, 8 aa, Artificial Sequence
  Peptide Derived from Human Papillomavirus
LGIGLSGH

SEQ ID NO: 44225 - protein, 11 aa, Artificial Sequence
  Peptide Derived from Human Papillomavirus
LGIGLSGHPFY

SEQ ID NO: 44226 - protein, 8 aa, Artificial Sequence
  Peptide Derived from Human Papillomavirus
LLTVGNPY

SEQ ID NO: 44227 - protein, 10 aa, Artificial Sequence
  Peptide Derived from Human Papillomavirus
LLTVGNPYFR

SEQ ID NO: 44228 - protein, 9 aa, Artificial Sequence
  Peptide Derived from Human Papillomavirus
LSGHPFYNK

SEQ ID NO: 44229 - protein, 8 aa, Artificial Sequence
  Peptide Derived from Human Papillomavirus
LTAEVMSY

SEQ ID NO: 44230 - protein, 10 aa, Artificial Sequence
  Peptide Derived from Human Papillomavirus
LTAEVMSYIH

SEQ ID NO: 44231 - protein, 9 aa, Artificial Sequence
  Peptide Derived from Human Papillomavirus
LTVGNPYFR

SEQ ID NO: 44232 - protein, 8 aa, Artificial Sequence
  Peptide Derived from Human Papillomavirus
LVQAGLRR

SEQ ID NO: 44233 - protein, 9 aa, Artificial Sequence
  Peptide Derived from Human Papillomavirus
LVQAGLRRR

SEQ ID NO: 44234 - protein, 9 aa, Artificial Sequence
  Peptide Derived from Human Papillomavirus
MAHNIIYGH

SEQ ID NO: 44235 - protein, 10 aa, Artificial Sequence
  Peptide Derived from Human Papillomavirus
MDFSTLQDTK

SEQ ID NO: 44236 - protein, 10 aa, Artificial Sequence
  Peptide Derived from Human Papillomavirus
MGDTVPTDLY

SEQ ID NO: 44237 - protein, 11 aa, Artificial Sequence
  Peptide Derived from Human Papillomavirus
NMRETPGSCVY

SEQ ID NO: 44238 - protein, 8 aa, Artificial Sequence
  Peptide Derived from Human Papillomavirus
NTDDYVSR

SEQ ID NO: 44239 - protein, 9 aa, Artificial Sequence
  Peptide Derived from Human Papillomavirus
NTYDPTKFK

SEQ ID NO: 44240 - protein, 10 aa, Artificial Sequence
  Peptide Derived from Human Papillomavirus
NTYDPTKFKH

SEQ ID NO: 44241 - protein, 11 aa, Artificial Sequence
  Peptide Derived from Human Papillomavirus
NTYDPTKFKHY

SEQ ID NO: 44242 - protein, 10 aa, Artificial Sequence
  Peptide Derived from Human Papillomavirus
PAASTSTASR

SEQ ID NO: 44243 - protein, 9 aa, Artificial Sequence
  Peptide Derived from Human Papillomavirus
PAIGEHWAK

SEQ ID NO: 44244 - protein, 8 aa, Artificial Sequence
  Peptide Derived from Human Papillomavirus
PAKRVRIR

SEQ ID NO: 44245 - protein, 10 aa, Artificial Sequence
  Peptide Derived from Human Papillomavirus
PAKRVRIRSK

SEQ ID NO: 44246 - protein, 11 aa, Artificial Sequence
  Peptide Derived from Human Papillomavirus
PAKRVRIRSKK

SEQ ID NO: 44247 - protein, 11 aa, Artificial Sequence
  Peptide Derived from Human Papillomavirus
PDYLQMSADPY

SEQ ID NO: 44248 - protein, 10 aa, Artificial Sequence
  Peptide Derived from Human Papillomavirus
PGDCPPLELK

SEQ ID NO: 44249 - protein, 10 aa, Artificial Sequence
  Peptide Derived from Human Papillomavirus
PIFLQMALWR

SEQ ID NO: 44250 - protein, 10 aa, Artificial Sequence
  Peptide Derived from Human Papillomavirus
PLDICQSICK

SEQ ID NO: 44251 - protein, 11 aa, Artificial Sequence
  Peptide Derived from Human Papillomavirus
PLDICQSICKY

SEQ ID NO: 44252 - protein, 9 aa, Artificial Sequence
  Peptide Derived from Human Papillomavirus
PLGIGLSGH

SEQ ID NO: 44253 - protein, 8 aa, Artificial Sequence
  Peptide Derived from Human Papillomavirus
PNTYDPTK

SEQ ID NO: 44254 - protein, 10 aa, Artificial Sequence
  Peptide Derived from Human Papillomavirus
PNTYDPTKFK

SEQ ID NO: 44255 - protein, 11 aa, Artificial Sequence
  Peptide Derived from Human Papillomavirus
PNTYDPTKFKH

SEQ ID NO: 44256 - protein, 8 aa, Artificial Sequence
  Peptide Derived from Human Papillomavirus
PTIGPRKR

SEQ ID NO: 44257 - protein, 9 aa, Artificial Sequence
  Peptide Derived from Human Papillomavirus
PTKFKHYSR

SEQ ID NO: 44258 - protein, 10 aa, Artificial Sequence
  Peptide Derived from Human Papillomavirus
PTKFKHYSRH

SEQ ID NO: 44259 - protein, 9 aa, Artificial Sequence
  Peptide Derived from Human Papillomavirus
PTTSLVDTY

SEQ ID NO: 44260 - protein, 10 aa, Artificial Sequence
  Peptide Derived from Human Papillomavirus
PTTSLVDTYR

SEQ ID NO: 44261 - protein, 10 aa, Artificial Sequence
  Peptide Derived from Human Papillomavirus
PVPNTYDPTK

SEQ ID NO: 44262 - protein, 9 aa, Artificial Sequence
  Peptide Derived from Human Papillomavirus
QAVPKVSAY

SEQ ID NO: 44263 - protein, 11 aa, Artificial Sequence
  Peptide Derived from Human Papillomavirus
QAVPKVSAYQY

SEQ ID NO: 44264 - protein, 8 aa, Artificial Sequence
  Peptide Derived from Human Papillomavirus
QDPYDKLK

SEQ ID NO: 44265 - protein, 11 aa, Artificial Sequence
  Peptide Derived from Human Papillomavirus
QDVRDNVSVDY

SEQ ID NO: 44266 - protein, 10 aa, Artificial Sequence
  Peptide Derived from Human Papillomavirus
QGHNNGICWH

SEQ ID NO: 44267 - protein, 10 aa, Artificial Sequence
  Peptide Derived from Human Papillomavirus
QLFARHFWNR

SEQ ID NO: 44268 - protein, 10 aa, Artificial Sequence
  Peptide Derived from Human Papillomavirus
QLFNKPYWLH

SEQ ID NO: 44269 - protein, 11 aa, Artificial Sequence
  Peptide Derived from Human Papillomavirus
QLFNKPYWLHK

SEQ ID NO: 44270 - protein, 11 aa, Artificial Sequence
  Peptide Derived from Human Papillomavirus
QLFVTVVDTTR

SEQ ID NO: 44271 - protein, 8 aa, Artificial Sequence
  Peptide Derived from Human Papillomavirus
QNPVPNTY

SEQ ID NO: 44272 - protein, 9 aa, Artificial Sequence
  Peptide Derived from Human Papillomavirus
QSICKYPDY

SEQ ID NO: 44273 - protein, 9 aa, Artificial Sequence
  Peptide Derived from Human Papillomavirus
QSVAVTCQK

SEQ ID NO: 44274 - protein, 8 aa, Artificial Sequence
  Peptide Derived from Human Papillomavirus
RDNVSVDY

SEQ ID NO: 44275 - protein, 9 aa, Artificial Sequence
  Peptide Derived from Human Papillomavirus
RDNVSVDYK

SEQ ID NO: 44276 - protein, 9 aa, Artificial Sequence
  Peptide Derived from Human Papillomavirus
RLLTVGNPY

SEQ ID NO: 44277 - protein, 11 aa, Artificial Sequence
  Peptide Derived from Human Papillomavirus
RLLTVGNPYFR

SEQ ID NO: 44278 - protein, 9 aa, Artificial Sequence
  Peptide Derived from Human Papillomavirus
RVALPDPNK

SEQ ID NO: 44279 - protein, 8 aa, Artificial Sequence
  Peptide Derived from Human Papillomavirus
RVRIRSKK

SEQ ID NO: 44280 - protein, 8 aa, Artificial Sequence
  Peptide Derived from Human Papillomavirus
RVVNTDDY

SEQ ID NO: 44281 - protein, 11 aa, Artificial Sequence
  Peptide Derived from Human Papillomavirus
RVVNTDDYVSR

SEQ ID NO: 44282 - protein, 10 aa, Artificial Sequence
  Peptide Derived from Human Papillomavirus
RVVPSGAGNK

SEQ ID NO: 44283 - protein, 9 aa, Artificial Sequence
  Peptide Derived from Human Papillomavirus
SAYQYRVFR

SEQ ID NO: 44284 - protein, 10 aa, Artificial Sequence
  Peptide Derived from Human Papillomavirus
SDLDQYPLGR

SEQ ID NO: 44285 - protein, 11 aa, Artificial Sequence
  Peptide Derived from Human Papillomavirus
SDLDQYPLGRK

SEQ ID NO: 44286 - protein, 8 aa, Artificial Sequence
  Peptide Derived from Human Papillomavirus
SDSQLFNK

SEQ ID NO: 44287 - protein, 10 aa, Artificial Sequence
  Peptide Derived from Human Papillomavirus
SDSQLFNKPY

SEQ ID NO: 44288 - protein, 11 aa, Artificial Sequence
  Peptide Derived from Human Papillomavirus
SGAGNKQAVPK

SEQ ID NO: 44289 - protein, 8 aa, Artificial Sequence
  Peptide Derived from Human Papillomavirus
SGHPFYNK

SEQ ID NO: 44290 - protein, 8 aa, Artificial Sequence
  Peptide Derived from Human Papillomavirus
SICKYPDY

SEQ ID NO: 44291 - protein, 10 aa, Artificial Sequence
  Peptide Derived from Human Papillomavirus
SIFYHAGSSR

SEQ ID NO: 44292 - protein, 8 aa, Artificial Sequence
  Peptide Derived from Human Papillomavirus
SMFFCLRR

SEQ ID NO: 44293 - protein, 11 aa, Artificial Sequence
  Peptide Derived from Human Papillomavirus
SSDLDQYPLGR

SEQ ID NO: 44294 - protein, 11 aa, Artificial Sequence
  Peptide Derived from Human Papillomavirus
SSRLLTVGNPY

SEQ ID NO: 44295 - protein, 8 aa, Artificial Sequence
  Peptide Derived from Human Papillomavirus
STASRPAK

SEQ ID NO: 44296 - protein, 9 aa, Artificial Sequence
  Peptide Derived from Human Papillomavirus
STASRPAKR

SEQ ID NO: 44297 - protein, 11 aa, Artificial Sequence
  Peptide Derived from Human Papillomavirus
STASRPAKRVR

SEQ ID NO: 44298 - protein, 10 aa, Artificial Sequence
  Peptide Derived from Human Papillomavirus
STIYNPETQR

SEQ ID NO: 44299 - protein, 10 aa, Artificial Sequence
  Peptide Derived from Human Papillomavirus
STQNPVPNTY

SEQ ID NO: 44300 - protein, 10 aa, Artificial Sequence
  Peptide Derived from Human Papillomavirus
STSTASRPAK

SEQ ID NO: 44301 - protein, 11 aa, Artificial Sequence
  Peptide Derived from Human Papillomavirus
STSTASRPAKR

SEQ ID NO: 44302 - protein, 11 aa, Artificial Sequence
  Peptide Derived from Human Papillomavirus
SVARVVNTDDY

SEQ ID NO: 44303 - protein, 8 aa, Artificial Sequence
  Peptide Derived from Human Papillomavirus
SVAVTCQK

SEQ ID NO: 44304 - protein, 9 aa, Artificial Sequence
  Peptide Derived from Human Papillomavirus
TAEVMSYIH

SEQ ID NO: 44305 - protein, 8 aa, Artificial Sequence
  Peptide Derived from Human Papillomavirus
TASRPAKR

SEQ ID NO: 44306 - protein, 10 aa, Artificial Sequence
  Peptide Derived from Human Papillomavirus
TASRPAKRVR

SEQ ID NO: 44307 - protein, 9 aa, Artificial Sequence
  Peptide Derived from Human Papillomavirus
TAVITQDVR

SEQ ID NO: 44308 - protein, 11 aa, Artificial Sequence
  Peptide Derived from Human Papillomavirus
TCQKDTTPPEK

SEQ ID NO: 44309 - protein, 11 aa, Artificial Sequence
  Peptide Derived from Human Papillomavirus
TITLTAEVMSY

SEQ ID NO: 44310 - protein, 9 aa, Artificial Sequence
  Peptide Derived from Human Papillomavirus
TIYNPETQR

SEQ ID NO: 44311 - protein, 9 aa, Artificial Sequence
  Peptide Derived from Human Papillomavirus
TLTAEVMSY

SEQ ID NO: 44312 - protein, 11 aa, Artificial Sequence
  Peptide Derived from Human Papillomavirus
TLTAEVMSYIH

SEQ ID NO: 44313 - protein, 9 aa, Artificial Sequence
  Peptide Derived from Human Papillomavirus
TSDSQLFNK

SEQ ID NO: 44314 - protein, 11 aa, Artificial Sequence
  Peptide Derived from Human Papillomavirus
TSDSQLFNKPY

SEQ ID NO: 44315 - protein, 11 aa, Artificial Sequence
  Peptide Derived from Human Papillomavirus
TSIFYHAGSSR

SEQ ID NO: 44316 - protein, 8 aa, Artificial Sequence
  Peptide Derived from Human Papillomavirus
TSLVDTYR

SEQ ID NO: 44317 - protein, 9 aa, Artificial Sequence
  Peptide Derived from Human Papillomavirus
TSTASRPAK

SEQ ID NO: 44318 - protein, 10 aa, Artificial Sequence
  Peptide Derived from Human Papillomavirus
TSTASRPAKR

SEQ ID NO: 44319 - protein, 10 aa, Artificial Sequence
  Peptide Derived from Human Papillomavirus
TTPPEKQDPY

SEQ ID NO: 44320 - protein, 10 aa, Artificial Sequence
  Peptide Derived from Human Papillomavirus
TTSDSQLFNK

SEQ ID NO: 44321 - protein, 8 aa, Artificial Sequence
  Peptide Derived from Human Papillomavirus
TTSLVDTY

SEQ ID NO: 44322 - protein, 9 aa, Artificial Sequence
  Peptide Derived from Human Papillomavirus
TTSLVDTYR

SEQ ID NO: 44323 - protein, 8 aa, Artificial Sequence
  Peptide Derived from Human Papillomavirus
TVGNPYFR

SEQ ID NO: 44324 - protein, 9 aa, Artificial Sequence
  Peptide Derived from Human Papillomavirus
TVPTDLYIK

SEQ ID NO: 44325 - protein, 11 aa, Artificial Sequence
  Peptide Derived from Human Papillomavirus
TVYLPPPSVAR

SEQ ID NO: 44326 - protein, 8 aa, Artificial Sequence
  Peptide Derived from Human Papillomavirus
VALPDPNK

SEQ ID NO: 44327 - protein, 10 aa, Artificial Sequence
  Peptide Derived from Human Papillomavirus
VARVVNTDDY

SEQ ID NO: 44328 - protein, 11 aa, Artificial Sequence
  Peptide Derived from Human Papillomavirus
VFRVALPDPNK

SEQ ID NO: 44329 - protein, 11 aa, Artificial Sequence
  Peptide Derived from Human Papillomavirus
VMGDTVPTDLY

SEQ ID NO: 44330 - protein, 9 aa, Artificial Sequence
  Peptide Derived from Human Papillomavirus
VNTDDYVSR

SEQ ID NO: 44331 - protein, 10 aa, Artificial Sequence
  Peptide Derived from Human Papillomavirus
VSAYQYRVFR

SEQ ID NO: 44332 - protein, 8 aa, Artificial Sequence
  Peptide Derived from Human Papillomavirus
VSRTSIFY

SEQ ID NO: 44333 - protein, 9 aa, Artificial Sequence
  Peptide Derived from Human Papillomavirus
VSRTSIFYH

SEQ ID NO: 44334 - protein, 8 aa, Artificial Sequence
  Peptide Derived from Human Papillomavirus
VTVVDTTR

SEQ ID NO: 44335 - protein, 10 aa, Artificial Sequence
  Peptide Derived from Human Papillomavirus
VVNTDDYVSR

SEQ ID NO: 44336 - protein, 9 aa, Artificial Sequence
  Peptide Derived from Human Papillomavirus
VVPSGAGNK

SEQ ID NO: 44337 - protein, 10 aa, Artificial Sequence
  Peptide Derived from Human Papillomavirus
WACVGMEIGR

SEQ ID NO: 44338 - protein, 8 aa, Artificial Sequence
  Peptide Derived from Human Papillomavirus
WAKGTLCK

SEQ ID NO: 44339 - protein, 8 aa, Artificial Sequence
  Peptide Derived from Human Papillomavirus
WLHKAQGH

SEQ ID NO: 44340 - protein, 8 aa, Artificial Sequence
  Peptide Derived from Human Papillomavirus
WTVDLKEK

SEQ ID NO: 44341 - protein, 8 aa, Artificial Sequence
  Peptide Derived from Human Papillomavirus
YDPTKFKH

SEQ ID NO: 44342 - protein, 9 aa, Artificial Sequence
  Peptide Derived from Human Papillomavirus
YDPTKFKHY

SEQ ID NO: 44343 - protein, 11 aa, Artificial Sequence
  Peptide Derived from Human Papillomavirus
YDPTKFKHYSR

SEQ ID NO: 44344 - protein, 10 aa, Artificial Sequence
  Peptide Derived from Human Papillomavirus
YGDSMFFCLR

SEQ ID NO: 44345 - protein, 11 aa, Artificial Sequence
  Peptide Derived from Human Papillomavirus
YGDSMFFCLRR

SEQ ID NO: 44346 - protein, 10 aa, Artificial Sequence
  Peptide Derived from Human Papillomavirus
YGHGIIIFLK

SEQ ID NO: 44347 - protein, 10 aa, Artificial Sequence
  Peptide Derived from Human Papillomavirus
YIKGTSANMR

SEQ ID NO: 44348 - protein, 9 aa, Artificial Sequence
  Peptide Derived from Human Papillomavirus
YLPPPSVAR

SEQ ID NO: 44349 - protein, 9 aa, Artificial Sequence
  Peptide Derived from Human Papillomavirus
YLQMSADPY

SEQ ID NO: 44350 - protein, 11 aa, Artificial Sequence
  Peptide Derived from Human Papillomavirus
YNKLDDTESAH

SEQ ID NO: 44351 - protein, 8 aa, Artificial Sequence
  Peptide Derived from Human Papillomavirus
YSRHVEEY

SEQ ID NO: 44352 - protein, 9 aa, Artificial Sequence
  Peptide Derived from Human Papillomavirus
YVSRTSIFY

SEQ ID NO: 44353 - protein, 10 aa, Artificial Sequence
  Peptide Derived from Human Papillomavirus
YVSRTSIFYH

SEQ ID NO: 44354 - protein, 10 aa, Artificial Sequence
  Peptide Derived from Human Papillomavirus
ALSSRRGTVR

SEQ ID NO: 44355 - protein, 8 aa, Artificial Sequence
  Peptide Derived from Human Papillomavirus
ASATDLYR

SEQ ID NO: 44356 - protein, 11 aa, Artificial Sequence
  Peptide Derived from Human Papillomavirus
ASATDLYRTCK

SEQ ID NO: 44357 - protein, 9 aa, Artificial Sequence
  Peptide Derived from Human Papillomavirus
ASTTPSTIH

SEQ ID NO: 44358 - protein, 10 aa, Artificial Sequence
  Peptide Derived from Human Papillomavirus
ASTTPSTIHK

SEQ ID NO: 44359 - protein, 10 aa, Artificial Sequence
  Peptide Derived from Human Papillomavirus
ASTTTYIGIH

SEQ ID NO: 44360 - protein, 9 aa, Artificial Sequence
  Peptide Derived from Human Papillomavirus
ATDLYRTCK

SEQ ID NO: 44361 - protein, 9 aa, Artificial Sequence
  Peptide Derived from Human Papillomavirus
ATMFTRSGK

SEQ ID NO: 44362 - protein, 11 aa, Artificial Sequence
  Peptide Derived from Human Papillomavirus
ATNDSDLFDVY

SEQ ID NO: 44363 - protein, 9 aa, Artificial Sequence
  Peptide Derived from Human Papillomavirus
DFMDIIRLH

SEQ ID NO: 44364 - protein, 10 aa, Artificial Sequence
  Peptide Derived from Human Papillomavirus
DFMDIIRLHR

SEQ ID NO: 44365 - protein, 9 aa, Artificial Sequence
  Peptide Derived from Human Papillomavirus
DSDFMDIIR

SEQ ID NO: 44366 - protein, 11 aa, Artificial Sequence
  Peptide Derived from Human Papillomavirus
DSDFMDIIRLH

SEQ ID NO: 44367 - protein, 8 aa, Artificial Sequence
  Peptide Derived from Human Papillomavirus
DSDLFDVY

SEQ ID NO: 44368 - protein, 8 aa, Artificial Sequence
  Peptide Derived from Human Papillomavirus
EGTTLADK

SEQ ID NO: 44369 - protein, 8 aa, Artificial Sequence
  Peptide Derived from Human Papillomavirus
FMDIIRLH

SEQ ID NO: 44370 - protein, 9 aa, Artificial Sequence
  Peptide Derived from Human Papillomavirus
FMDIIRLHR

SEQ ID NO: 44371 - protein, 11 aa, Artificial Sequence
  Peptide Derived from Human Papillomavirus
FTRSGKQIGGR

SEQ ID NO: 44372 - protein, 10 aa, Artificial Sequence
  Peptide Derived from Human Papillomavirus
FVGTPTSGSH

SEQ ID NO: 44373 - protein, 8 aa, Artificial Sequence
  Peptide Derived from Human Papillomavirus
GGRVHFYH

SEQ ID NO: 44374 - protein, 11 aa, Artificial Sequence
  Peptide Derived from Human Papillomavirus
GIGTGSGSGGR

SEQ ID NO: 44375 - protein, 8 aa, Artificial Sequence
  Peptide Derived from Human Papillomavirus
GIHGTQYY

SEQ ID NO: 44376 - protein, 8 aa, Artificial Sequence
  Peptide Derived from Human Papillomavirus
GSGGRTGY

SEQ ID NO: 44377 - protein, 10 aa, Artificial Sequence
  Peptide Derived from Human Papillomavirus
GSGSGGRTGY

SEQ ID NO: 44378 - protein, 10 aa, Artificial Sequence
  Peptide Derived from Human Papillomavirus
GTCPPDVINK

SEQ ID NO: 44379 - protein, 9 aa, Artificial Sequence
  Peptide Derived from Human Papillomavirus
GTGSGSGGR

SEQ ID NO: 44380 - protein, 8 aa, Artificial Sequence
  Peptide Derived from Human Papillomavirus
GTPTSGSH

SEQ ID NO: 44381 - protein, 10 aa, Artificial Sequence
  Peptide Derived from Human Papillomavirus
GTPTSGSHGY

SEQ ID NO: 44382 - protein, 10 aa, Artificial Sequence
  Peptide Derived from Human Papillomavirus
GTQYYLWPWY

SEQ ID NO: 44383 - protein, 11 aa, Artificial Sequence
  Peptide Derived from Human Papillomavirus
GTQYYLWPWYY

SEQ ID NO: 44384 - protein, 11 aa, Artificial Sequence
  Peptide Derived from Human Papillomavirus
GTVRFSRLGQR

SEQ ID NO: 44385 - protein, 11 aa, Artificial Sequence
  Peptide Derived from Human Papillomavirus
HGTQYYLWPWY

SEQ ID NO: 44386 - protein, 11 aa, Artificial Sequence
  Peptide Derived from Human Papillomavirus
IFVGTPTSGSH

SEQ ID NO: 44387 - protein, 8 aa, Artificial Sequence
  Peptide Derived from Human Papillomavirus
IGGRVHFY

SEQ ID NO: 44388 - protein, 9 aa, Artificial Sequence
  Peptide Derived from Human Papillomavirus
IGGRVHFYH

SEQ ID NO: 44389 - protein, 8 aa, Artificial Sequence
  Peptide Derived from Human Papillomavirus
IGIHGTQY

SEQ ID NO: 44390 - protein, 9 aa, Artificial Sequence
  Peptide Derived from Human Papillomavirus
IGIHGTQYY

SEQ ID NO: 44391 - protein, 10 aa, Artificial Sequence
  Peptide Derived from Human Papillomavirus
IGTGSGSGGR

SEQ ID NO: 44392 - protein, 10 aa, Artificial Sequence
  Peptide Derived from Human Papillomavirus
ISSTPLPTVR

SEQ ID NO: 44393 - protein, 11 aa, Artificial Sequence
  Peptide Derived from Human Papillomavirus
ISSTPLPTVRR

SEQ ID NO: 44394 - protein, 8 aa, Artificial Sequence
  Peptide Derived from Human Papillomavirus
KSFTYPKY

SEQ ID NO: 44395 - protein, 10 aa, Artificial Sequence
  Peptide Derived from Human Papillomavirus
KVEGTTLADK

SEQ ID NO: 44396 - protein, 10 aa, Artificial Sequence
  Peptide Derived from Human Papillomavirus
LGQRATMFTR

SEQ ID NO: 44397 - protein, 9 aa, Artificial Sequence
  Peptide Derived from Human Papillomavirus
LSSRRGTVR

SEQ ID NO: 44398 - protein, 11 aa, Artificial Sequence
  Peptide Derived from Human Papillomavirus
LTMPSTAASSY

SEQ ID NO: 44399 - protein, 10 aa, Artificial Sequence
  Peptide Derived from Human Papillomavirus
LTSAWDVPIY

SEQ ID NO: 44400 - protein, 9 aa, Artificial Sequence
  Peptide Derived from Human Papillomavirus
LVTFDNPAY

SEQ ID NO: 44401 - protein, 8 aa, Artificial Sequence
  Peptide Derived from Human Papillomavirus
MDIIRLHR

SEQ ID NO: 44402 - protein, 8 aa, Artificial Sequence
  Peptide Derived from Human Papillomavirus
MVSHRAAR

SEQ ID NO: 44403 - protein, 9 aa, Artificial Sequence
  Peptide Derived from Human Papillomavirus
MVSHRAARR

SEQ ID NO: 44404 - protein, 10 aa, Artificial Sequence
  Peptide Derived from Human Papillomavirus
MVSHRAARRK

SEQ ID NO: 44405 - protein, 11 aa, Artificial Sequence
  Peptide Derived from Human Papillomavirus
MVSHRAARRKR

SEQ ID NO: 44406 - protein, 11 aa, Artificial Sequence
  Peptide Derived from Human Papillomavirus
NASTTTYIGIH

SEQ ID NO: 44407 - protein, 9 aa, Artificial Sequence
  Peptide Derived from Human Papillomavirus
NDSDLFDVY

SEQ ID NO: 44408 - protein, 10 aa, Artificial Sequence
  Peptide Derived from Human Papillomavirus
NTVVDVGPTR

SEQ ID NO: 44409 - protein, 11 aa, Artificial Sequence
  Peptide Derived from Human Papillomavirus
PALSSRRGTVR

SEQ ID NO: 44410 - protein, 10 aa, Artificial Sequence
  Peptide Derived from Human Papillomavirus
PASTTPSTIH

SEQ ID NO: 44411 - protein, 11 aa, Artificial Sequence
  Peptide Derived from Human Papillomavirus
PASTTPSTIHK

SEQ ID NO: 44412 - protein, 8 aa, Artificial Sequence
  Peptide Derived from Human Papillomavirus
PDIILPSH

SEQ ID NO: 44413 - protein, 10 aa, Artificial Sequence
  Peptide Derived from Human Papillomavirus
PDSDFMDIIR

SEQ ID NO: 44414 - protein, 11 aa, Artificial Sequence
  Peptide Derived from Human Papillomavirus
PISSTPLPTVR

SEQ ID NO: 44415 - protein, 9 aa, Artificial Sequence
  Peptide Derived from Human Papillomavirus
PLPTVRRVR

SEQ ID NO: 44416 - protein, 11 aa, Artificial Sequence
  Peptide Derived from Human Papillomavirus
PLTSAWDVPIY

SEQ ID NO: 44417 - protein, 8 aa, Artificial Sequence
  Peptide Derived from Human Papillomavirus
PSTAASSY

SEQ ID NO: 44418 - protein, 10 aa, Artificial Sequence
  Peptide Derived from Human Papillomavirus
PSTIHKSFTY

SEQ ID NO: 44419 - protein, 9 aa, Artificial Sequence
  Peptide Derived from Human Papillomavirus
PTNASTTTY

SEQ ID NO: 44420 - protein, 8 aa, Artificial Sequence
  Peptide Derived from Human Papillomavirus
PTSGSHGY

SEQ ID NO: 44421 - protein, 10 aa, Artificial Sequence
  Peptide Derived from Human Papillomavirus
PTVRRVRGPR

SEQ ID NO: 44422 - protein, 9 aa, Artificial Sequence
  Peptide Derived from Human Papillomavirus
QIGGRVHFY

SEQ ID NO: 44423 - protein, 10 aa, Artificial Sequence
  Peptide Derived from Human Papillomavirus
QIGGRVHFYH

SEQ ID NO: 44424 - protein, 8 aa, Artificial Sequence
  Peptide Derived from Human Papillomavirus
RASATDLY

SEQ ID NO: 44425 - protein, 9 aa, Artificial Sequence
  Peptide Derived from Human Papillomavirus
RASATDLYR

SEQ ID NO: 44426 - protein, 10 aa, Artificial Sequence
  Peptide Derived from Human Papillomavirus
RATMFTRSGK

SEQ ID NO: 44427 - protein, 8 aa, Artificial Sequence
  Peptide Derived from Human Papillomavirus
RFSRLGQR

SEQ ID NO: 44428 - protein, 8 aa, Artificial Sequence
  Peptide Derived from Human Papillomavirus
RGPRLYSR

SEQ ID NO: 44429 - protein, 8 aa, Artificial Sequence
  Peptide Derived from Human Papillomavirus
RGTVRFSR

SEQ ID NO: 44430 - protein, 11 aa, Artificial Sequence
  Peptide Derived from Human Papillomavirus
RLGQRATMFTR

SEQ ID NO: 44431 - protein, 10 aa, Artificial Sequence
  Peptide Derived from Human Papillomavirus
RLHRPALSSR

SEQ ID NO: 44432 - protein, 11 aa, Artificial Sequence
  Peptide Derived from Human Papillomavirus
RLHRPALSSRR

SEQ ID NO: 44433 - protein, 11 aa, Artificial Sequence
  Peptide Derived from Human Papillomavirus
RLYSRANQQVR

SEQ ID NO: 44434 - protein, 9 aa, Artificial Sequence
  Peptide Derived from Human Papillomavirus
RSGKQIGGR

SEQ ID NO: 44435 - protein, 11 aa, Artificial Sequence
  Peptide Derived from Human Papillomavirus
RSGKQIGGRVH

SEQ ID NO: 44436 - protein, 10 aa, Artificial Sequence
  Peptide Derived from Human Papillomavirus
RTGYVPLGGR

SEQ ID NO: 44437 - protein, 8 aa, Artificial Sequence
  Peptide Derived from Human Papillomavirus
RVRGPRLY

SEQ ID NO: 44438 - protein, 10 aa, Artificial Sequence
  Peptide Derived from Human Papillomavirus
RVRGPRLYSR

SEQ ID NO: 44439 - protein, 10 aa, Artificial Sequence
  Peptide Derived from Human Papillomavirus
RVSTSQFLTH

SEQ ID NO: 44440 - protein, 10 aa, Artificial Sequence
  Peptide Derived from Human Papillomavirus
SATDLYRTCK

SEQ ID NO: 44441 - protein, 8 aa, Artificial Sequence
  Peptide Derived from Human Papillomavirus
SAWDVPIY

SEQ ID NO: 44442 - protein, 8 aa, Artificial Sequence
  Peptide Derived from Human Papillomavirus
SDFMDIIR

SEQ ID NO: 44443 - protein, 10 aa, Artificial Sequence
  Peptide Derived from Human Papillomavirus
SDFMDIIRLH

SEQ ID NO: 44444 - protein, 11 aa, Artificial Sequence
  Peptide Derived from Human Papillomavirus
SDFMDIIRLHR

SEQ ID NO: 44445 - protein, 8 aa, Artificial Sequence
  Peptide Derived from Human Papillomavirus
SGKQIGGR

SEQ ID NO: 44446 - protein, 10 aa, Artificial Sequence
  Peptide Derived from Human Papillomavirus
SGKQIGGRVH

SEQ ID NO: 44447 - protein, 9 aa, Artificial Sequence
  Peptide Derived from Human Papillomavirus
SGSGGRTGY

SEQ ID NO: 44448 - protein, 11 aa, Artificial Sequence
  Peptide Derived from Human Papillomavirus
SGTCPPDVINK

SEQ ID NO: 44449 - protein, 10 aa, Artificial Sequence
  Peptide Derived from Human Papillomavirus
SLVTFDNPAY

SEQ ID NO: 44450 - protein, 11 aa, Artificial Sequence
  Peptide Derived from Human Papillomavirus
SNTVVDVGPTR

SEQ ID NO: 44451 - protein, 11 aa, Artificial Sequence
  Peptide Derived from Human Papillomavirus
SSLVTFDNPAY

SEQ ID NO: 44452 - protein, 8 aa, Artificial Sequence
  Peptide Derived from Human Papillomavirus
SSRRGTVR

SEQ ID NO: 44453 - protein, 11 aa, Artificial Sequence
  Peptide Derived from Human Papillomavirus
SSRRGTVRFSR

SEQ ID NO: 44454 - protein, 9 aa, Artificial Sequence
  Peptide Derived from Human Papillomavirus
SSTPLPTVR

SEQ ID NO: 44455 - protein, 10 aa, Artificial Sequence
  Peptide Derived from Human Papillomavirus
SSTPLPTVRR

SEQ ID NO: 44456 - protein, 9 aa, Artificial Sequence
  Peptide Derived from Human Papillomavirus
STIHKSFTY

SEQ ID NO: 44457 - protein, 11 aa, Artificial Sequence
  Peptide Derived from Human Papillomavirus
STIHKSFTYPK

SEQ ID NO: 44458 - protein, 8 aa, Artificial Sequence
  Peptide Derived from Human Papillomavirus
STPLPTVR

SEQ ID NO: 44459 - protein, 9 aa, Artificial Sequence
  Peptide Derived from Human Papillomavirus
STPLPTVRR

SEQ ID NO: 44460 - protein, 11 aa, Artificial Sequence
  Peptide Derived from Human Papillomavirus
STPLPTVRRVR

SEQ ID NO: 44461 - protein, 8 aa, Artificial Sequence
  Peptide Derived from Human Papillomavirus
STSQFLTH

SEQ ID NO: 44462 - protein, 8 aa, Artificial Sequence
  Peptide Derived from Human Papillomavirus
STTPSTIH

SEQ ID NO: 44463 - protein, 9 aa, Artificial Sequence
  Peptide Derived from Human Papillomavirus
STTPSTIHK

SEQ ID NO: 44464 - protein, 9 aa, Artificial Sequence
  Peptide Derived from Human Papillomavirus
STTTYIGIH

SEQ ID NO: 44465 - protein, 9 aa, Artificial Sequence
  Peptide Derived from Human Papillomavirus
TCPPDVINK

SEQ ID NO: 44466 - protein, 8 aa, Artificial Sequence
  Peptide Derived from Human Papillomavirus
TDLYRTCK

SEQ ID NO: 44467 - protein, 10 aa, Artificial Sequence
  Peptide Derived from Human Papillomavirus
TGPDIILPSH

SEQ ID NO: 44468 - protein, 8 aa, Artificial Sequence
  Peptide Derived from Human Papillomavirus
TGSGSGGR

SEQ ID NO: 44469 - protein, 11 aa, Artificial Sequence
  Peptide Derived from Human Papillomavirus
TGSGSGGRTGY

SEQ ID NO: 44470 - protein, 9 aa, Artificial Sequence
  Peptide Derived from Human Papillomavirus
TGYVPLGGR

SEQ ID NO: 44471 - protein, 8 aa, Artificial Sequence
  Peptide Derived from Human Papillomavirus
TIHKSFTY

SEQ ID NO: 44472 - protein, 10 aa, Artificial Sequence
  Peptide Derived from Human Papillomavirus
TIHKSFTYPK

SEQ ID NO: 44473 - protein, 11 aa, Artificial Sequence
  Peptide Derived from Human Papillomavirus
TIHKSFTYPKY

SEQ ID NO: 44474 - protein, 8 aa, Artificial Sequence
  Peptide Derived from Human Papillomavirus
TMFTRSGK

SEQ ID NO: 44475 - protein, 10 aa, Artificial Sequence
  Peptide Derived from Human Papillomavirus
TMPSTAASSY

SEQ ID NO: 44476 - protein, 8 aa, Artificial Sequence
  Peptide Derived from Human Papillomavirus
TNASTTTY

SEQ ID NO: 44477 - protein, 10 aa, Artificial Sequence
  Peptide Derived from Human Papillomavirus
TNDSDLFDVY

SEQ ID NO: 44478 - protein, 9 aa, Artificial Sequence
  Peptide Derived from Human Papillomavirus
TSAWDVPIY

SEQ ID NO: 44479 - protein, 11 aa, Artificial Sequence
  Peptide Derived from Human Papillomavirus
TSPTNASTTTY

SEQ ID NO: 44480 - protein, 8 aa, Artificial Sequence
  Peptide Derived from Human Papillomavirus
TTPSTIHK

SEQ ID NO: 44481 - protein, 8 aa, Artificial Sequence
  Peptide Derived from Human Papillomavirus
TTTYIGIH

SEQ ID NO: 44482 - protein, 11 aa, Artificial Sequence
  Peptide Derived from Human Papillomavirus
TTYIGIHGTQY

SEQ ID NO: 44483 - protein, 10 aa, Artificial Sequence
  Peptide Derived from Human Papillomavirus
TVRFSRLGQR

SEQ ID NO: 44484 - protein, 9 aa, Artificial Sequence
  Peptide Derived from Human Papillomavirus
TVRRVRGPR

SEQ ID NO: 44485 - protein, 11 aa, Artificial Sequence
  Peptide Derived from Human Papillomavirus
TVRRVRGPRLY

SEQ ID NO: 44486 - protein, 9 aa, Artificial Sequence
  Peptide Derived from Human Papillomavirus
TVVDVGPTR

SEQ ID NO: 44487 - protein, 9 aa, Artificial Sequence
  Peptide Derived from Human Papillomavirus
VGTPTSGSH

SEQ ID NO: 44488 - protein, 11 aa, Artificial Sequence
  Peptide Derived from Human Papillomavirus
VGTPTSGSHGY

SEQ ID NO: 44489 - protein, 8 aa, Artificial Sequence
  Peptide Derived from Human Papillomavirus
VSHRAARR

SEQ ID NO: 44490 - protein, 9 aa, Artificial Sequence
  Peptide Derived from Human Papillomavirus
VSHRAARRK

SEQ ID NO: 44491 - protein, 10 aa, Artificial Sequence
  Peptide Derived from Human Papillomavirus
VSHRAARRKR

SEQ ID NO: 44492 - protein, 9 aa, Artificial Sequence
  Peptide Derived from Human Papillomavirus
VSTSQFLTH

SEQ ID NO: 44493 - protein, 8 aa, Artificial Sequence
  Peptide Derived from Human Papillomavirus
VTFDNPAY

SEQ ID NO: 44494 - protein, 8 aa, Artificial Sequence
  Peptide Derived from Human Papillomavirus
VVDVGPTR

SEQ ID NO: 44495 - protein, 8 aa, Artificial Sequence
  Peptide Derived from Human Papillomavirus
YFPKKRKR

SEQ ID NO: 44496 - protein, 11 aa, Artificial Sequence
  Peptide Derived from Human Papillomavirus
YFPKKRKRIPY

SEQ ID NO: 44497 - protein, 9 aa, Artificial Sequence
  Peptide Derived from Human Papillomavirus
YIGIHGTQY

SEQ ID NO: 44498 - protein, 10 aa, Artificial Sequence
  Peptide Derived from Human Papillomavirus
YIGIHGTQYY

SEQ ID NO: 44499 - protein, 8 aa, Artificial Sequence
  Peptide Derived from Human Papillomavirus
YLWPWYYY

SEQ ID NO: 44500 - protein, 11 aa, Artificial Sequence
  Peptide Derived from Human Papillomavirus
YLWPWYYYFPK

SEQ ID NO: 44501 - protein, 9 aa, Artificial Sequence
  Peptide Derived from Human Papillomavirus
YSRANQQVR

SEQ ID NO: 44502 - protein, 11 aa, Artificial Sequence
  Peptide Derived from Human Papillomavirus
YTGPDIILPSH

SEQ ID NO: 44503 - protein, 9 aa, Artificial Sequence
  Peptide Derived from Human Papillomavirus
AAVSHRPGK

SEQ ID NO: 44504 - protein, 10 aa, Artificial Sequence
  Peptide Derived from Human Papillomavirus
AAVSHRPGKR

SEQ ID NO: 44505 - protein, 10 aa, Artificial Sequence
  Peptide Derived from Human Papillomavirus
ALESLSTTIY

SEQ ID NO: 44506 - protein, 8 aa, Artificial Sequence
  Peptide Derived from Human Papillomavirus
AVSHRPGK

SEQ ID NO: 44507 - protein, 9 aa, Artificial Sequence
  Peptide Derived from Human Papillomavirus
AVSHRPGKR

SEQ ID NO: 44508 - protein, 11 aa, Artificial Sequence
  Peptide Derived from Human Papillomavirus
AVSHRPGKRPR

SEQ ID NO: 44509 - protein, 8 aa, Artificial Sequence
  Peptide Derived from Human Papillomavirus
CCRYRFQK

SEQ ID NO: 44510 - protein, 9 aa, Artificial Sequence
  Peptide Derived from Human Papillomavirus
CCRYRFQKY

SEQ ID NO: 44511 - protein, 10 aa, Artificial Sequence
  Peptide Derived from Human Papillomavirus
CCRYRFQKYK

SEQ ID NO: 44512 - protein, 8 aa, Artificial Sequence
  Peptide Derived from Human Papillomavirus
CFKKEGQH

SEQ ID NO: 44513 - protein, 8 aa, Artificial Sequence
  Peptide Derived from Human Papillomavirus
CLQVCKAK

SEQ ID NO: 44514 - protein, 8 aa, Artificial Sequence
  Peptide Derived from Human Papillomavirus
CMQYVAWK

SEQ ID NO: 44515 - protein, 9 aa, Artificial Sequence
  Peptide Derived from Human Papillomavirus
CMQYVAWKY

SEQ ID NO: 44516 - protein, 11 aa, Artificial Sequence
  Peptide Derived from Human Papillomavirus
CMQYVAWKYIY

SEQ ID NO: 44517 - protein, 10 aa, Artificial Sequence
  Peptide Derived from Human Papillomavirus
CSGVDYRGIY

SEQ ID NO: 44518 - protein, 11 aa, Artificial Sequence
  Peptide Derived from Human Papillomavirus
CSGVDYRGIYY

SEQ ID NO: 44519 - protein, 10 aa, Artificial Sequence
  Peptide Derived from Human Papillomavirus
DAAVSHRPGK

SEQ ID NO: 44520 - protein, 11 aa, Artificial Sequence
  Peptide Derived from Human Papillomavirus
DAAVSHRPGKR

SEQ ID NO: 44521 - protein, 8 aa, Artificial Sequence
  Peptide Derived from Human Papillomavirus
DFEQEAKK

SEQ ID NO: 44522 - protein, 10 aa, Artificial Sequence
  Peptide Derived from Human Papillomavirus
DGSKNNCMQY

SEQ ID NO: 44523 - protein, 8 aa, Artificial Sequence
  Peptide Derived from Human Papillomavirus
DNTDSRSR

SEQ ID NO: 44524 - protein, 9 aa, Artificial Sequence
  Peptide Derived from Human Papillomavirus
DSSRESHAK

SEQ ID NO: 44525 - protein, 8 aa, Artificial Sequence
  Peptide Derived from Human Papillomavirus
DSVSSTCR

SEQ ID NO: 44526 - protein, 9 aa, Artificial Sequence
  Peptide Derived from Human Papillomavirus
DSVSSTCRY

SEQ ID NO: 44527 - protein, 8 aa, Artificial Sequence
  Peptide Derived from Human Papillomavirus
DTDNTDSR

SEQ ID NO: 44528 - protein, 10 aa, Artificial Sequence
  Peptide Derived from Human Papillomavirus
DTDNTDSRSR

SEQ ID NO: 44529 - protein, 8 aa, Artificial Sequence
  Peptide Derived from Human Papillomavirus
EAKKFGCK

SEQ ID NO: 44530 - protein, 9 aa, Artificial Sequence
  Peptide Derived from Human Papillomavirus
EFDSSRESH

SEQ ID NO: 44531 - protein, 11 aa, Artificial Sequence
  Peptide Derived from Human Papillomavirus
EFDSSRESHAK

SEQ ID NO: 44532 - protein, 8 aa, Artificial Sequence
  Peptide Derived from Human Papillomavirus
ELWLTEPK

SEQ ID NO: 44533 - protein, 9 aa, Artificial Sequence
  Peptide Derived from Human Papillomavirus
ELWLTEPKK

SEQ ID NO: 44534 - protein, 8 aa, Artificial Sequence
  Peptide Derived from Human Papillomavirus
ESEFDSSR

SEQ ID NO: 44535 - protein, 11 aa, Artificial Sequence
  Peptide Derived from Human Papillomavirus
ESEFDSSRESH

SEQ ID NO: 44536 - protein, 10 aa, Artificial Sequence
  Peptide Derived from Human Papillomavirus
ESHAKCVTTH

SEQ ID NO: 44537 - protein, 8 aa, Artificial Sequence
  Peptide Derived from Human Papillomavirus
ESLSTTIY

SEQ ID NO: 44538 - protein, 10 aa, Artificial Sequence
  Peptide Derived from Human Papillomavirus
ETQRNSFLSH

SEQ ID NO: 44539 - protein, 9 aa, Artificial Sequence
  Peptide Derived from Human Papillomavirus
ETVNEYNTH

SEQ ID NO: 44540 - protein, 10 aa, Artificial Sequence
  Peptide Derived from Human Papillomavirus
ETVNEYNTHK

SEQ ID NO: 44541 - protein, 10 aa, Artificial Sequence
  Peptide Derived from Human Papillomavirus
EVHMENESIY

SEQ ID NO: 44542 - protein, 8 aa, Artificial Sequence
  Peptide Derived from Human Papillomavirus
EVWFDGSK

SEQ ID NO: 44543 - protein, 11 aa, Artificial Sequence
  Peptide Derived from Human Papillomavirus
FDGSKNNCMQY

SEQ ID NO: 44544 - protein, 8 aa, Artificial Sequence
  Peptide Derived from Human Papillomavirus
FDSSRESH

SEQ ID NO: 44545 - protein, 10 aa, Artificial Sequence
  Peptide Derived from Human Papillomavirus
FDSSRESHAK

SEQ ID NO: 44546 - protein, 10 aa, Artificial Sequence
  Peptide Derived from Human Papillomavirus
FGCKNIWEVH

SEQ ID NO: 44547 - protein, 11 aa, Artificial Sequence
  Peptide Derived from Human Papillomavirus
FLSHVKIPVVY

SEQ ID NO: 44548 - protein, 8 aa, Artificial Sequence
  Peptide Derived from Human Papillomavirus
FVDVTSTY

SEQ ID NO: 44549 - protein, 9 aa, Artificial Sequence
  Peptide Derived from Human Papillomavirus
FVDVTSTYH

SEQ ID NO: 44550 - protein, 9 aa, Artificial Sequence
  Peptide Derived from Human Papillomavirus
GCKNIWEVH

SEQ ID NO: 44551 - protein, 9 aa, Artificial Sequence
  Peptide Derived from Human Papillomavirus
GDKTTPVVH

SEQ ID NO: 44552 - protein, 11 aa, Artificial Sequence
  Peptide Derived from Human Papillomavirus
GDKTTPVVHLK

SEQ ID NO: 44553 - protein, 9 aa, Artificial Sequence
  Peptide Derived from Human Papillomavirus
GIYYVHDGH

SEQ ID NO: 44554 - protein, 10 aa, Artificial Sequence
  Peptide Derived from Human Papillomavirus
GIYYVHDGHK

SEQ ID NO: 44555 - protein, 9 aa, Artificial Sequence
  Peptide Derived from Human Papillomavirus
GNQDAAVSH

SEQ ID NO: 44556 - protein, 10 aa, Artificial Sequence
  Peptide Derived from Human Papillomavirus
GNQDAAVSHR

SEQ ID NO: 44557 - protein, 9 aa, Artificial Sequence
  Peptide Derived from Human Papillomavirus
GSKNNCMQY

SEQ ID NO: 44558 - protein, 8 aa, Artificial Sequence
  Peptide Derived from Human Papillomavirus
GVDYRGIY

SEQ ID NO: 44559 - protein, 9 aa, Artificial Sequence
  Peptide Derived from Human Papillomavirus
GVDYRGIYY

SEQ ID NO: 44560 - protein, 11 aa, Artificial Sequence
  Peptide Derived from Human Papillomavirus
GVDYRGIYYVH

SEQ ID NO: 44561 - protein, 8 aa, Artificial Sequence
  Peptide Derived from Human Papillomavirus
HAKCVTTH

SEQ ID NO: 44562 - protein, 10 aa, Artificial Sequence
  Peptide Derived from Human Papillomavirus
HAKCVTTHTH

SEQ ID NO: 44563 - protein, 8 aa, Artificial Sequence
  Peptide Derived from Human Papillomavirus
HDGHKTYY

SEQ ID NO: 44564 - protein, 10 aa, Artificial Sequence
  Peptide Derived from Human Papillomavirus
HIEVWFDGSK

SEQ ID NO: 44565 - protein, 11 aa, Artificial Sequence
  Peptide Derived from Human Papillomavirus
HISDTDNTDSR

SEQ ID NO: 44566 - protein, 8 aa, Artificial Sequence
  Peptide Derived from Human Papillomavirus
HLKGEPNR

SEQ ID NO: 44567 - protein, 10 aa, Artificial Sequence
  Peptide Derived from Human Papillomavirus
HLKGEPNRLK

SEQ ID NO: 44568 - protein, 8 aa, Artificial Sequence
  Peptide Derived from Human Papillomavirus
HMENESIY

SEQ ID NO: 44569 - protein, 8 aa, Artificial Sequence
  Peptide Derived from Human Papillomavirus
HVKIPVVY

SEQ ID NO: 44570 - protein, 9 aa, Artificial Sequence
  Peptide Derived from Human Papillomavirus
HVKIPVVYR

SEQ ID NO: 44571 - protein, 11 aa, Artificial Sequence
  Peptide Derived from Human Papillomavirus
IALESLSTTIY

SEQ ID NO: 44572 - protein, 9 aa, Artificial Sequence
  Peptide Derived from Human Papillomavirus
IIYKDETQR

SEQ ID NO: 44573 - protein, 10 aa, Artificial Sequence
  Peptide Derived from Human Papillomavirus
INNNNHPGDK

SEQ ID NO: 44574 - protein, 10 aa, Artificial Sequence
  Peptide Derived from Human Papillomavirus
ISDTDNTDSR

SEQ ID NO: 44575 - protein, 11 aa, Artificial Sequence
  Peptide Derived from Human Papillomavirus
ITIIYKDETQR

SEQ ID NO: 44576 - protein, 9 aa, Artificial Sequence
  Peptide Derived from Human Papillomavirus
KCCRYRFQK

SEQ ID NO: 44577 - protein, 10 aa, Artificial Sequence
  Peptide Derived from Human Papillomavirus
KCCRYRFQKY

SEQ ID NO: 44578 - protein, 11 aa, Artificial Sequence
  Peptide Derived from Human Papillomavirus
KCCRYRFQKYK

SEQ ID NO: 44579 - protein, 9 aa, Artificial Sequence
  Peptide Derived from Human Papillomavirus
KCFKKEGQH

SEQ ID NO: 44580 - protein, 8 aa, Artificial Sequence
  Peptide Derived from Human Papillomavirus
KCVTTHTH

SEQ ID NO: 44581 - protein, 11 aa, Artificial Sequence
  Peptide Derived from Human Papillomavirus
KFGCKNIWEVH

SEQ ID NO: 44582 - protein, 8 aa, Artificial Sequence
  Peptide Derived from Human Papillomavirus
KGEPNRLK

SEQ ID NO: 44583 - protein, 11 aa, Artificial Sequence
  Peptide Derived from Human Papillomavirus
KGEPNRLKCCR

SEQ ID NO: 44584 - protein, 11 aa, Artificial Sequence
  Peptide Derived from Human Papillomavirus
KNNCMQYVAWK

SEQ ID NO: 44585 - protein, 10 aa, Artificial Sequence
  Peptide Derived from Human Papillomavirus
KNYSIITIIY

SEQ ID NO: 44586 - protein, 11 aa, Artificial Sequence
  Peptide Derived from Human Papillomavirus
KNYSIITIIYK

SEQ ID NO: 44587 - protein, 11 aa, Artificial Sequence
  Peptide Derived from Human Papillomavirus
KTLFVDVTSTY

SEQ ID NO: 44588 - protein, 9 aa, Artificial Sequence
  Peptide Derived from Human Papillomavirus
KTTPVVHLK

SEQ ID NO: 44589 - protein, 8 aa, Artificial Sequence
  Peptide Derived from Human Papillomavirus
KVCSGVDY

SEQ ID NO: 44590 - protein, 9 aa, Artificial Sequence
  Peptide Derived from Human Papillomavirus
KVCSGVDYR

SEQ ID NO: 44591 - protein, 9 aa, Artificial Sequence
  Peptide Derived from Human Papillomavirus
LFVDVTSTY

SEQ ID NO: 44592 - protein, 10 aa, Artificial Sequence
  Peptide Derived from Human Papillomavirus
LFVDVTSTYH

SEQ ID NO: 44593 - protein, 10 aa, Artificial Sequence
  Peptide Derived from Human Papillomavirus
LSHVKIPVVY

SEQ ID NO: 44594 - protein, 11 aa, Artificial Sequence
  Peptide Derived from Human Papillomavirus
LSHVKIPVVYR

SEQ ID NO: 44595 - protein, 9 aa, Artificial Sequence
  Peptide Derived from Human Papillomavirus
LTEPKKCFK

SEQ ID NO: 44596 - protein, 10 aa, Artificial Sequence
  Peptide Derived from Human Papillomavirus
LTEPKKCFKK

SEQ ID NO: 44597 - protein, 9 aa, Artificial Sequence
  Peptide Derived from Human Papillomavirus
MVPCLQVCK

SEQ ID NO: 44598 - protein, 11 aa, Artificial Sequence
  Peptide Derived from Human Papillomavirus
MVPCLQVCKAK

SEQ ID NO: 44599 - protein, 9 aa, Artificial Sequence
  Peptide Derived from Human Papillomavirus
NCMQYVAWK

SEQ ID NO: 44600 - protein, 10 aa, Artificial Sequence
  Peptide Derived from Human Papillomavirus
NCMQYVAWKY

SEQ ID NO: 44601 - protein, 8 aa, Artificial Sequence
  Peptide Derived from Human Papillomavirus
NGDCGWQK

SEQ ID NO: 44602 - protein, 10 aa, Artificial Sequence
  Peptide Derived from Human Papillomavirus
NNCMQYVAWK

SEQ ID NO: 44603 - protein, 11 aa, Artificial Sequence
  Peptide Derived from Human Papillomavirus
NNCMQYVAWKY

SEQ ID NO: 44604 - protein, 8 aa, Artificial Sequence
  Peptide Derived from Human Papillomavirus
NNEEWTLR

SEQ ID NO: 44605 - protein, 8 aa, Artificial Sequence
  Peptide Derived from Human Papillomavirus
NNNHPGDK

SEQ ID NO: 44606 - protein, 9 aa, Artificial Sequence
  Peptide Derived from Human Papillomavirus
NNNNHPGDK

SEQ ID NO: 44607 - protein, 8 aa, Artificial Sequence
  Peptide Derived from Human Papillomavirus
NSFLSHVK

SEQ ID NO: 44608 - protein, 11 aa, Artificial Sequence
  Peptide Derived from Human Papillomavirus
NVSPVETVNEY

SEQ ID NO: 44609 - protein, 9 aa, Artificial Sequence
  Peptide Derived from Human Papillomavirus
PCLQVCKAK

SEQ ID NO: 44610 - protein, 9 aa, Artificial Sequence
  Peptide Derived from Human Papillomavirus
PDSVSSTCR

SEQ ID NO: 44611 - protein, 10 aa, Artificial Sequence
  Peptide Derived from Human Papillomavirus
PDSVSSTCRY

SEQ ID NO: 44612 - protein, 10 aa, Artificial Sequence
  Peptide Derived from Human Papillomavirus
PGDKTTPVVH

SEQ ID NO: 44613 - protein, 8 aa, Artificial Sequence
  Peptide Derived from Human Papillomavirus
PGKRPRLR

SEQ ID NO: 44614 - protein, 8 aa, Artificial Sequence
  Peptide Derived from Human Papillomavirus
PNRLKCCR

SEQ ID NO: 44615 - protein, 9 aa, Artificial Sequence
  Peptide Derived from Human Papillomavirus
PNRLKCCRY

SEQ ID NO: 44616 - protein, 10 aa, Artificial Sequence
  Peptide Derived from Human Papillomavirus
PNRLKCCRYR

SEQ ID NO: 44617 - protein, 8 aa, Artificial Sequence
  Peptide Derived from Human Papillomavirus
PVETVNEY

SEQ ID NO: 44618 - protein, 11 aa, Artificial Sequence
  Peptide Derived from Human Papillomavirus
PVETVNEYNTH

SEQ ID NO: 44619 - protein, 11 aa, Artificial Sequence
  Peptide Derived from Human Papillomavirus
PVVHLKGEPNR

SEQ ID NO: 44620 - protein, 10 aa, Artificial Sequence
  Peptide Derived from Human Papillomavirus
PVVYRLVWDK

SEQ ID NO: 44621 - protein, 8 aa, Artificial Sequence
  Peptide Derived from Human Papillomavirus
QDAAVSHR

SEQ ID NO: 44622 - protein, 11 aa, Artificial Sequence
  Peptide Derived from Human Papillomavirus
QDAAVSHRPGK

SEQ ID NO: 44623 - protein, 10 aa, Artificial Sequence
  Peptide Derived from Human Papillomavirus
RGIYYVHDGH

SEQ ID NO: 44624 - protein, 11 aa, Artificial Sequence
  Peptide Derived from Human Papillomavirus
RGIYYVHDGHK

SEQ ID NO: 44625 - protein, 8 aa, Artificial Sequence
  Peptide Derived from Human Papillomavirus
RLKCCRYR

SEQ ID NO: 44626 - protein, 11 aa, Artificial Sequence
  Peptide Derived from Human Papillomavirus
RLKCCRYRFQK

SEQ ID NO: 44627 - protein, 11 aa, Artificial Sequence
  Peptide Derived from Human Papillomavirus
RLRESEFDSSR

SEQ ID NO: 44628 - protein, 9 aa, Artificial Sequence
  Peptide Derived from Human Papillomavirus
RNSFLSHVK

SEQ ID NO: 44629 - protein, 8 aa, Artificial Sequence
  Peptide Derived from Human Papillomavirus
RSINNNNH

SEQ ID NO: 44630 - protein, 10 aa, Artificial Sequence
  Peptide Derived from Human Papillomavirus
RSRSINNNNH

SEQ ID NO: 44631 - protein, 9 aa, Artificial Sequence
  Peptide Derived from Human Papillomavirus
SDTDNTDSR

SEQ ID NO: 44632 - protein, 11 aa, Artificial Sequence
  Peptide Derived from Human Papillomavirus
SDTDNTDSRSR

SEQ ID NO: 44633 - protein, 9 aa, Artificial Sequence
  Peptide Derived from Human Papillomavirus
SGVDYRGIY

SEQ ID NO: 44634 - protein, 10 aa, Artificial Sequence
  Peptide Derived from Human Papillomavirus
SGVDYRGIYY

SEQ ID NO: 44635 - protein, 8 aa, Artificial Sequence
  Peptide Derived from Human Papillomavirus
SIITIIYK

SEQ ID NO: 44636 - protein, 11 aa, Artificial Sequence
  Peptide Derived from Human Papillomavirus
SINNNNHPGDK

SEQ ID NO: 44637 - protein, 8 aa, Artificial Sequence
  Peptide Derived from Human Papillomavirus
SSRESHAK

SEQ ID NO: 44638 - protein, 11 aa, Artificial Sequence
  Peptide Derived from Human Papillomavirus
STYHWTSTDNK

SEQ ID NO: 44639 - protein, 11 aa, Artificial Sequence
  Peptide Derived from Human Papillomavirus
SVGNQDAAVSH

SEQ ID NO: 44640 - protein, 8 aa, Artificial Sequence
  Peptide Derived from Human Papillomavirus
SVSSTCRY

SEQ ID NO: 44641 - protein, 11 aa, Artificial Sequence
  Peptide Derived from Human Papillomavirus
TCEELWLTEPK

SEQ ID NO: 44642 - protein, 8 aa, Artificial Sequence
  Peptide Derived from Human Papillomavirus
TDFEQEAK

SEQ ID NO: 44643 - protein, 9 aa, Artificial Sequence
  Peptide Derived from Human Papillomavirus
TDFEQEAKK

SEQ ID NO: 44644 - protein, 9 aa, Artificial Sequence
  Peptide Derived from Human Papillomavirus
TDNTDSRSR

SEQ ID NO: 44645 - protein, 10 aa, Artificial Sequence
  Peptide Derived from Human Papillomavirus
TIIYKDETQR

SEQ ID NO: 44646 - protein, 11 aa, Artificial Sequence
  Peptide Derived from Human Papillomavirus
TIYNNEEWTLR

SEQ ID NO: 44647 - protein, 10 aa, Artificial Sequence
  Peptide Derived from Human Papillomavirus
TLFVDVTSTY

SEQ ID NO: 44648 - protein, 11 aa, Artificial Sequence
  Peptide Derived from Human Papillomavirus
TLFVDVTSTYH

SEQ ID NO: 44649 - protein, 8 aa, Artificial Sequence
  Peptide Derived from Human Papillomavirus
TSTDNKNY

SEQ ID NO: 44650 - protein, 8 aa, Artificial Sequence
  Peptide Derived from Human Papillomavirus
TTPVVHLK

SEQ ID NO: 44651 - protein, 8 aa, Artificial Sequence
  Peptide Derived from Human Papillomavirus
TVNEYNTH

SEQ ID NO: 44652 - protein, 9 aa, Artificial Sequence
  Peptide Derived from Human Papillomavirus
TVNEYNTHK

SEQ ID NO: 44653 - protein, 8 aa, Artificial Sequence
  Peptide Derived from Human Papillomavirus
VAWKYIYY

SEQ ID NO: 44654 - protein, 8 aa, Artificial Sequence
  Peptide Derived from Human Papillomavirus
VCSGVDYR

SEQ ID NO: 44655 - protein, 11 aa, Artificial Sequence
  Peptide Derived from Human Papillomavirus
VCSGVDYRGIY

SEQ ID NO: 44656 - protein, 8 aa, Artificial Sequence
  Peptide Derived from Human Papillomavirus
VDVTSTYH

SEQ ID NO: 44657 - protein, 8 aa, Artificial Sequence
  Peptide Derived from Human Papillomavirus
VDYRGIYY

SEQ ID NO: 44658 - protein, 10 aa, Artificial Sequence
  Peptide Derived from Human Papillomavirus
VDYRGIYYVH

SEQ ID NO: 44659 - protein, 10 aa, Artificial Sequence
  Peptide Derived from Human Papillomavirus
VGNQDAAVSH

SEQ ID NO: 44660 - protein, 11 aa, Artificial Sequence
  Peptide Derived from Human Papillomavirus
VGNQDAAVSHR

SEQ ID NO: 44661 - protein, 8 aa, Artificial Sequence
  Peptide Derived from Human Papillomavirus
VNEYNTHK

SEQ ID NO: 44662 - protein, 8 aa, Artificial Sequence
  Peptide Derived from Human Papillomavirus
VSHRPGKR

SEQ ID NO: 44663 - protein, 10 aa, Artificial Sequence
  Peptide Derived from Human Papillomavirus
VSHRPGKRPR

SEQ ID NO: 44664 - protein, 10 aa, Artificial Sequence
  Peptide Derived from Human Papillomavirus
VSPVETVNEY

SEQ ID NO: 44665 - protein, 10 aa, Artificial Sequence
  Peptide Derived from Human Papillomavirus
VVHLKGEPNR

SEQ ID NO: 44666 - protein, 9 aa, Artificial Sequence
  Peptide Derived from Human Papillomavirus
VVYRLVWDK

SEQ ID NO: 44667 - protein, 10 aa, Artificial Sequence
  Peptide Derived from Human Papillomavirus
WLTEPKKCFK

SEQ ID NO: 44668 - protein, 11 aa, Artificial Sequence
  Peptide Derived from Human Papillomavirus
WLTEPKKCFKK

SEQ ID NO: 44669 - protein, 9 aa, Artificial Sequence
  Peptide Derived from Human Papillomavirus
WTSTDNKNY

SEQ ID NO: 44670 - protein, 11 aa, Artificial Sequence
  Peptide Derived from Human Papillomavirus
YCPDSVSSTCR

SEQ ID NO: 44671 - protein, 9 aa, Artificial Sequence
  Peptide Derived from Human Papillomavirus
YNGDCGWQK

SEQ ID NO: 44672 - protein, 9 aa, Artificial Sequence
  Peptide Derived from Human Papillomavirus
YNNEEWTLR

SEQ ID NO: 44673 - protein, 8 aa, Artificial Sequence
  Peptide Derived from Human Papillomavirus
YSIITIIY

SEQ ID NO: 44674 - protein, 9 aa, Artificial Sequence
  Peptide Derived from Human Papillomavirus
YSIITIIYK

SEQ ID NO: 44675 - protein, 9 aa, Artificial Sequence
  Peptide Derived from Human Papillomavirus
YTDFEQEAK

SEQ ID NO: 44676 - protein, 10 aa, Artificial Sequence
  Peptide Derived from Human Papillomavirus
YTDFEQEAKK

SEQ ID NO: 44677 - protein, 8 aa, Artificial Sequence
  Peptide Derived from Human Papillomavirus
YVAWKYIY

SEQ ID NO: 44678 - protein, 9 aa, Artificial Sequence
  Peptide Derived from Human Papillomavirus
YVAWKYIYY

SEQ ID NO: 44679 - protein, 9 aa, Artificial Sequence
  Peptide Derived from Human Papillomavirus
YVHDGHKTY

SEQ ID NO: 44680 - protein, 10 aa, Artificial Sequence
  Peptide Derived from Human Papillomavirus
YVHDGHKTYY

SEQ ID NO: 44681 - protein, 9 aa, Artificial Sequence
  Peptide Derived from Human Papillomavirus
ACTELKLVY

SEQ ID NO: 44682 - protein, 10 aa, Artificial Sequence
  Peptide Derived from Human Papillomavirus
ACTELKLVYR

SEQ ID NO: 44683 - protein, 8 aa, Artificial Sequence
  Peptide Derived from Human Papillomavirus
ATLESITK

SEQ ID NO: 44684 - protein, 9 aa, Artificial Sequence
  Peptide Derived from Human Papillomavirus
ATLESITKK

SEQ ID NO: 44685 - protein, 10 aa, Artificial Sequence
  Peptide Derived from Human Papillomavirus
AVCRVCLLFY

SEQ ID NO: 44686 - protein, 8 aa, Artificial Sequence
  Peptide Derived from Human Papillomavirus
CDLLIRCY

SEQ ID NO: 44687 - protein, 9 aa, Artificial Sequence
  Peptide Derived from Human Papillomavirus
CDLLIRCYR

SEQ ID NO: 44688 - protein, 8 aa, Artificial Sequence
  Peptide Derived from Human Papillomavirus
CDRKRRFH

SEQ ID NO: 44689 - protein, 10 aa, Artificial Sequence
  Peptide Derived from Human Papillomavirus
CLGCWRQTSR

SEQ ID NO: 44690 - protein, 9 aa, Artificial Sequence
  Peptide Derived from Human Papillomavirus
CLLFYSKVR

SEQ ID NO: 44691 - protein, 10 aa, Artificial Sequence
  Peptide Derived from Human Papillomavirus
CLLFYSKVRK

SEQ ID NO: 44692 - protein, 11 aa, Artificial Sequence
  Peptide Derived from Human Papillomavirus
CLLFYSKVRKY

SEQ ID NO: 44693 - protein, 8 aa, Artificial Sequence
  Peptide Derived from Human Papillomavirus
CTELKLVY

SEQ ID NO: 44694 - protein, 9 aa, Artificial Sequence
  Peptide Derived from Human Papillomavirus
CTELKLVYR

SEQ ID NO: 44695 - protein, 10 aa, Artificial Sequence
  Peptide Derived from Human Papillomavirus
CVYCKKELTR

SEQ ID NO: 44696 - protein, 9 aa, Artificial Sequence
  Peptide Derived from Human Papillomavirus
DDFPYAVCR

SEQ ID NO: 44697 - protein, 8 aa, Artificial Sequence
  Peptide Derived from Human Papillomavirus
DFPYAVCR

SEQ ID NO: 44698 - protein, 8 aa, Artificial Sequence
  Peptide Derived from Human Papillomavirus
DLLIRCYR

SEQ ID NO: 44699 - protein, 8 aa, Artificial Sequence
  Peptide Derived from Human Papillomavirus
DLRLSCVY

SEQ ID NO: 44700 - protein, 10 aa, Artificial Sequence
  Peptide Derived from Human Papillomavirus
DLRLSCVYCK

SEQ ID NO: 44701 - protein, 11 aa, Artificial Sequence
  Peptide Derived from Human Papillomavirus
DLRLSCVYCKK

SEQ ID NO: 44702 - protein, 8 aa, Artificial Sequence
  Peptide Derived from Human Papillomavirus
EIPLIDLR

SEQ ID NO: 44703 - protein, 8 aa, Artificial Sequence
  Peptide Derived from Human Papillomavirus
ELTRAEVY

SEQ ID NO: 44704 - protein, 11 aa, Artificial Sequence
  Peptide Derived from Human Papillomavirus
EVLEIPLIDLR

SEQ ID NO: 44705 - protein, 11 aa, Artificial Sequence
  Peptide Derived from Human Papillomavirus
EVYNFACTELK

SEQ ID NO: 44706 - protein, 10 aa, Artificial Sequence
  Peptide Derived from Human Papillomavirus
FACTELKLVY

SEQ ID NO: 44707 - protein, 11 aa, Artificial Sequence
  Peptide Derived from Human Papillomavirus
FACTELKLVYR

SEQ ID NO: 44708 - protein, 9 aa, Artificial Sequence
  Peptide Derived from Human Papillomavirus
FNNPQERPR

SEQ ID NO: 44709 - protein, 9 aa, Artificial Sequence
  Peptide Derived from Human Papillomavirus
GATLESITK

SEQ ID NO: 44710 - protein, 10 aa, Artificial Sequence
  Peptide Derived from Human Papillomavirus
GATLESITKK

SEQ ID NO: 44711 - protein, 8 aa, Artificial Sequence
  Peptide Derived from Human Papillomavirus
GCWRQTSR

SEQ ID NO: 44712 - protein, 11 aa, Artificial Sequence
  Peptide Derived from Human Papillomavirus
GCWRQTSREPR

SEQ ID NO: 44713 - protein, 8 aa, Artificial Sequence
  Peptide Derived from Human Papillomavirus
GSCLGCWR

SEQ ID NO: 44714 - protein, 9 aa, Artificial Sequence
  Peptide Derived from Human Papillomavirus
HCDRKRRFH

SEQ ID NO: 44715 - protein, 9 aa, Artificial Sequence
  Peptide Derived from Human Papillomavirus
IDLRLSCVY

SEQ ID NO: 44716 - protein, 11 aa, Artificial Sequence
  Peptide Derived from Human Papillomavirus
IDLRLSCVYCK

SEQ ID NO: 44717 - protein, 10 aa, Artificial Sequence
  Peptide Derived from Human Papillomavirus
KLVYRDDFPY

SEQ ID NO: 44718 - protein, 8 aa, Artificial Sequence
  Peptide Derived from Human Papillomavirus
KVRKYRYY

SEQ ID NO: 44719 - protein, 10 aa, Artificial Sequence
  Peptide Derived from Human Papillomavirus
KVRKYRYYDY

SEQ ID NO: 44720 - protein, 9 aa, Artificial Sequence
  Peptide Derived from Human Papillomavirus
LCDLLIRCY

SEQ ID NO: 44721 - protein, 10 aa, Artificial Sequence
  Peptide Derived from Human Papillomavirus
LCDLLIRCYR

SEQ ID NO: 44722 - protein, 8 aa, Artificial Sequence
  Peptide Derived from Human Papillomavirus
LFYSKVRK

SEQ ID NO: 44723 - protein, 9 aa, Artificial Sequence
  Peptide Derived from Human Papillomavirus
LFYSKVRKY

SEQ ID NO: 44724 - protein, 10 aa, Artificial Sequence
  Peptide Derived from Human Papillomavirus
LFYSKVRKYR

SEQ ID NO: 44725 - protein, 11 aa, Artificial Sequence
  Peptide Derived from Human Papillomavirus
LFYSKVRKYRY

SEQ ID NO: 44726 - protein, 9 aa, Artificial Sequence
  Peptide Derived from Human Papillomavirus
LGCWRQTSR

SEQ ID NO: 44727 - protein, 10 aa, Artificial Sequence
  Peptide Derived from Human Papillomavirus
LIDLRLSCVY

SEQ ID NO: 44728 - protein, 8 aa, Artificial Sequence
  Peptide Derived from Human Papillomavirus
LLFYSKVR

SEQ ID NO: 44729 - protein, 9 aa, Artificial Sequence
  Peptide Derived from Human Papillomavirus
LLFYSKVRK

SEQ ID NO: 44730 - protein, 10 aa, Artificial Sequence
  Peptide Derived from Human Papillomavirus
LLFYSKVRKY

SEQ ID NO: 44731 - protein, 11 aa, Artificial Sequence
  Peptide Derived from Human Papillomavirus
LLFYSKVRKYR

SEQ ID NO: 44732 - protein, 8 aa, Artificial Sequence
  Peptide Derived from Human Papillomavirus
LSCVYCKK

SEQ ID NO: 44733 - protein, 9 aa, Artificial Sequence
  Peptide Derived from Human Papillomavirus
LTPEEKQLH

SEQ ID NO: 44734 - protein, 9 aa, Artificial Sequence
  Peptide Derived from Human Papillomavirus
LVYRDDFPY

SEQ ID NO: 44735 - protein, 8 aa, Artificial Sequence
  Peptide Derived from Human Papillomavirus
NFACTELK

SEQ ID NO: 44736 - protein, 11 aa, Artificial Sequence
  Peptide Derived from Human Papillomavirus
NFACTELKLVY

SEQ ID NO: 44737 - protein, 8 aa, Artificial Sequence
  Peptide Derived from Human Papillomavirus
NNPQERPR

SEQ ID NO: 44738 - protein, 11 aa, Artificial Sequence
  Peptide Derived from Human Papillomavirus
NNPQERPRSLH

SEQ ID NO: 44739 - protein, 11 aa, Artificial Sequence
  Peptide Derived from Human Papillomavirus
PLIDLRLSCVY

SEQ ID NO: 44740 - protein, 10 aa, Artificial Sequence
  Peptide Derived from Human Papillomavirus
PLTPEEKQLH

SEQ ID NO: 44741 - protein, 8 aa, Artificial Sequence
  Peptide Derived from Human Papillomavirus
QFNNPQER

SEQ ID NO: 44742 - protein, 10 aa, Artificial Sequence
  Peptide Derived from Human Papillomavirus
QFNNPQERPR

SEQ ID NO: 44743 - protein, 8 aa, Artificial Sequence
  Peptide Derived from Human Papillomavirus
QLCDLLIR

SEQ ID NO: 44744 - protein, 10 aa, Artificial Sequence
  Peptide Derived from Human Papillomavirus
QLCDLLIRCY

SEQ ID NO: 44745 - protein, 11 aa, Artificial Sequence
  Peptide Derived from Human Papillomavirus
QLCDLLIRCYR

SEQ ID NO: 44746 - protein, 8 aa, Artificial Sequence
  Peptide Derived from Human Papillomavirus
QLHCDRKR

SEQ ID NO: 44747 - protein, 9 aa, Artificial Sequence
  Peptide Derived from Human Papillomavirus
QLHCDRKRR

SEQ ID NO: 44748 - protein, 11 aa, Artificial Sequence
  Peptide Derived from Human Papillomavirus
QLHCDRKRRFH

SEQ ID NO: 44749 - protein, 9 aa, Artificial Sequence
  Peptide Derived from Human Papillomavirus
QSPLTPEEK

SEQ ID NO: 44750 - protein, 11 aa, Artificial Sequence
  Peptide Derived from Human Papillomavirus
RCQSPLTPEEK

SEQ ID NO: 44751 - protein, 10 aa, Artificial Sequence
  Peptide Derived from Human Papillomavirus
RDDFPYAVCR

SEQ ID NO: 44752 - protein, 8 aa, Artificial Sequence
  Peptide Derived from Human Papillomavirus
RLSCVYCK

SEQ ID NO: 44753 - protein, 9 aa, Artificial Sequence
  Peptide Derived from Human Papillomavirus
RLSCVYCKK

SEQ ID NO: 44754 - protein, 9 aa, Artificial Sequence
  Peptide Derived from Human Papillomavirus
RVCLLFYSK

SEQ ID NO: 44755 - protein, 11 aa, Artificial Sequence
  Peptide Derived from Human Papillomavirus
RVCLLFYSKVR

SEQ ID NO: 44756 - protein, 11 aa, Artificial Sequence
  Peptide Derived from Human Papillomavirus
SCLGCWRQTSR

SEQ ID NO: 44757 - protein, 11 aa, Artificial Sequence
  Peptide Derived from Human Papillomavirus
SCVYCKKELTR

SEQ ID NO: 44758 - protein, 9 aa, Artificial Sequence
  Peptide Derived from Human Papillomavirus
TGSCLGCWR

SEQ ID NO: 44759 - protein, 8 aa, Artificial Sequence
  Peptide Derived from Human Papillomavirus
TLESITKK

SEQ ID NO: 44760 - protein, 8 aa, Artificial Sequence
  Peptide Derived from Human Papillomavirus
VCLLFYSK

SEQ ID NO: 44761 - protein, 10 aa, Artificial Sequence
  Peptide Derived from Human Papillomavirus
VCLLFYSKVR

SEQ ID NO: 44762 - protein, 11 aa, Artificial Sequence
  Peptide Derived from Human Papillomavirus
VCLLFYSKVRK

SEQ ID NO: 44763 - protein, 9 aa, Artificial Sequence
  Peptide Derived from Human Papillomavirus
VCRVCLLFY

SEQ ID NO: 44764 - protein, 11 aa, Artificial Sequence
  Peptide Derived from Human Papillomavirus
VCRVCLLFYSK

SEQ ID NO: 44765 - protein, 10 aa, Artificial Sequence
  Peptide Derived from Human Papillomavirus
VLEIPLIDLR

SEQ ID NO: 44766 - protein, 10 aa, Artificial Sequence
  Peptide Derived from Human Papillomavirus
WTGSCLGCWR

SEQ ID NO: 44767 - protein, 11 aa, Artificial Sequence
  Peptide Derived from Human Papillomavirus
YAVCRVCLLFY

SEQ ID NO: 44768 - protein, 8 aa, Artificial Sequence
  Peptide Derived from Human Papillomavirus
YCKKELTR

SEQ ID NO: 44769 - protein, 10 aa, Artificial Sequence
  Peptide Derived from Human Papillomavirus
YGATLESITK

SEQ ID NO: 44770 - protein, 11 aa, Artificial Sequence
  Peptide Derived from Human Papillomavirus
YGATLESITKK

SEQ ID NO: 44771 - protein, 9 aa, Artificial Sequence
  Peptide Derived from Human Papillomavirus
YNFACTELK

SEQ ID NO: 44772 - protein, 8 aa, Artificial Sequence
  Peptide Derived from Human Papillomavirus
YSKVRKYR

SEQ ID NO: 44773 - protein, 9 aa, Artificial Sequence
  Peptide Derived from Human Papillomavirus
YSKVRKYRY

SEQ ID NO: 44774 - protein, 10 aa, Artificial Sequence
  Peptide Derived from Human Papillomavirus
YSKVRKYRYY

SEQ ID NO: 44775 - protein, 10 aa, Artificial Sequence
  Peptide Derived from Human Papillomavirus
DIQSTKEDLR

SEQ ID NO: 44776 - protein, 10 aa, Artificial Sequence
  Peptide Derived from Human Papillomavirus
EDEDEDEVDH

SEQ ID NO: 44777 - protein, 8 aa, Artificial Sequence
  Peptide Derived from Human Papillomavirus
EDEDEVDH

SEQ ID NO: 44778 - protein, 10 aa, Artificial Sequence
  Peptide Derived from Human Papillomavirus
EDEVDHLQER

SEQ ID NO: 44779 - protein, 8 aa, Artificial Sequence
  Peptide Derived from Human Papillomavirus
EVDHLQER

SEQ ID NO: 44780 - protein, 11 aa, Artificial Sequence
  Peptide Derived from Human Papillomavirus
FVVQLDIQSTK

SEQ ID NO: 44781 - protein, 10 aa, Artificial Sequence
  Peptide Derived from Human Papillomavirus
HLQERPQQAR

SEQ ID NO: 44782 - protein, 8 aa, Artificial Sequence
  Peptide Derived from Human Papillomavirus
HVPCCECK

SEQ ID NO: 44783 - protein, 11 aa, Artificial Sequence
  Peptide Derived from Human Papillomavirus
LDIQSTKEDLR

SEQ ID NO: 44784 - protein, 10 aa, Artificial Sequence
  Peptide Derived from Human Papillomavirus
LIHVPCCECK

SEQ ID NO: 44785 - protein, 8 aa, Artificial Sequence
  Peptide Derived from Human Papillomavirus
QAKQHTCY

SEQ ID NO: 44786 - protein, 11 aa, Artificial Sequence
  Peptide Derived from Human Papillomavirus
QAKQHTCYLIH

SEQ ID NO: 44787 - protein, 8 aa, Artificial Sequence
  Peptide Derived from Human Papillomavirus
QARQAKQH

SEQ ID NO: 44788 - protein, 11 aa, Artificial Sequence
  Peptide Derived from Human Papillomavirus
QARQAKQHTCY

SEQ ID NO: 44789 - protein, 8 aa, Artificial Sequence
  Peptide Derived from Human Papillomavirus
QLDIQSTK

SEQ ID NO: 44790 - protein, 8 aa, Artificial Sequence
  Peptide Derived from Human Papillomavirus
QSTKEDLR

SEQ ID NO: 44791 - protein, 10 aa, Artificial Sequence
  Peptide Derived from Human Papillomavirus
VVQLDIQSTK

SEQ ID NO: 44792 - protein, 11 aa, Artificial Sequence
  Peptide Derived from Human Papillomavirus
YLIHVPCCECK

SEQ ID NO: 44793 - protein, 9 aa, Artificial Sequence
  Peptide Derived from Human Papillomavirus
ACVGLEVGR

SEQ ID NO: 44794 - protein, 11 aa, Artificial Sequence
  Peptide Derived from Human Papillomavirus
ADAYGDSMWFY

SEQ ID NO: 44795 - protein, 11 aa, Artificial Sequence
  Peptide Derived from Human Papillomavirus
AGLSGHPLFNR

SEQ ID NO: 44796 - protein, 11 aa, Artificial Sequence
  Peptide Derived from Human Papillomavirus
AGSSRLLAVGH

SEQ ID NO: 44797 - protein, 11 aa, Artificial Sequence
  Peptide Derived from Human Papillomavirus
AMDFKVLQESK

SEQ ID NO: 44798 - protein, 8 aa, Artificial Sequence
  Peptide Derived from Human Papillomavirus
AMGEHWTK

SEQ ID NO: 44799 - protein, 10 aa, Artificial Sequence
  Peptide Derived from Human Papillomavirus
ANNNVIEDSR

SEQ ID NO: 44800 - protein, 8 aa, Artificial Sequence
  Peptide Derived from Human Papillomavirus
ATDSYVKR

SEQ ID NO: 44801 - protein, 8 aa, Artificial Sequence
  Peptide Derived from Human Papillomavirus
ATEQLSKY

SEQ ID NO: 44802 - protein, 11 aa, Artificial Sequence
  Peptide Derived from Human Papillomavirus
ATEQLSKYDAR

SEQ ID NO: 44803 - protein, 8 aa, Artificial Sequence
  Peptide Derived from Human Papillomavirus
ATSLEDKY

SEQ ID NO: 44804 - protein, 9 aa, Artificial Sequence
  Peptide Derived from Human Papillomavirus
ATSLEDKYR

SEQ ID NO: 44805 - protein, 10 aa, Artificial Sequence
  Peptide Derived from Human Papillomavirus
ATSLEDKYRY

SEQ ID NO: 44806 - protein, 9 aa, Artificial Sequence
  Peptide Derived from Human Papillomavirus
ATWRPSENK

SEQ ID NO: 44807 - protein, 11 aa, Artificial Sequence
  Peptide Derived from Human Papillomavirus
ATWRPSENKVY

SEQ ID NO: 44808 - protein, 8 aa, Artificial Sequence
  Peptide Derived from Human Papillomavirus
AVATSKKR

SEQ ID NO: 44809 - protein, 11 aa, Artificial Sequence
  Peptide Derived from Human Papillomavirus
AVGHPYYSVTK

SEQ ID NO: 44810 - protein, 8 aa, Artificial Sequence
  Peptide Derived from Human Papillomavirus
CTPAMGEH

SEQ ID NO: 44811 - protein, 11 aa, Artificial Sequence
  Peptide Derived from Human Papillomavirus
CTPAMGEHWTK

SEQ ID NO: 44812 - protein, 8 aa, Artificial Sequence
  Peptide Derived from Human Papillomavirus
CVGLEVGR

SEQ ID NO: 44813 - protein, 8 aa, Artificial Sequence
  Peptide Derived from Human Papillomavirus
DARKINQY

SEQ ID NO: 44814 - protein, 10 aa, Artificial Sequence
  Peptide Derived from Human Papillomavirus
DARKINQYLR

SEQ ID NO: 44815 - protein, 11 aa, Artificial Sequence
  Peptide Derived from Human Papillomavirus
DARKINQYLRH

SEQ ID NO: 44816 - protein, 10 aa, Artificial Sequence
  Peptide Derived from Human Papillomavirus
DAYGDSMWFY

SEQ ID NO: 44817 - protein, 9 aa, Artificial Sequence
  Peptide Derived from Human Papillomavirus
DFKVLQESK

SEQ ID NO: 44818 - protein, 8 aa, Artificial Sequence
  Peptide Derived from Human Papillomavirus
DIVQSTCK

SEQ ID NO: 44819 - protein, 9 aa, Artificial Sequence
  Peptide Derived from Human Papillomavirus
DIVQSTCKY

SEQ ID NO: 44820 - protein, 9 aa, Artificial Sequence
  Peptide Derived from Human Papillomavirus
DLDQFPLGR

SEQ ID NO: 44821 - protein, 10 aa, Artificial Sequence
  Peptide Derived from Human Papillomavirus
DLDQFPLGRK

SEQ ID NO: 44822 - protein, 8 aa, Artificial Sequence
  Peptide Derived from Human Papillomavirus
DNISVDGK

SEQ ID NO: 44823 - protein, 9 aa, Artificial Sequence
  Peptide Derived from Human Papillomavirus
DNTKTNIPK

SEQ ID NO: 44824 - protein, 8 aa, Artificial Sequence
  Peptide Derived from Human Papillomavirus
DSMWFYLR

SEQ ID NO: 44825 - protein, 9 aa, Artificial Sequence
  Peptide Derived from Human Papillomavirus
DSMWFYLRR

SEQ ID NO: 44826 - protein, 11 aa, Artificial Sequence
  Peptide Derived from Human Papillomavirus
DSRDNISVDGK

SEQ ID NO: 44827 - protein, 11 aa, Artificial Sequence
  Peptide Derived from Human Papillomavirus
DSYVKRTSIFY

SEQ ID NO: 44828 - protein, 10 aa, Artificial Sequence
  Peptide Derived from Human Papillomavirus
DTGFGAMDFK

SEQ ID NO: 44829 - protein, 11 aa, Artificial Sequence
  Peptide Derived from Human Papillomavirus
DTNIYNPDQER

SEQ ID NO: 44830 - protein, 9 aa, Artificial Sequence
  Peptide Derived from Human Papillomavirus
EAQLFNKPY

SEQ ID NO: 44831 - protein, 8 aa, Artificial Sequence
  Peptide Derived from Human Papillomavirus
EDKYRYVR

SEQ ID NO: 44832 - protein, 10 aa, Artificial Sequence
  Peptide Derived from Human Papillomavirus
ELQFVFQLCK

SEQ ID NO: 44833 - protein, 10 aa, Artificial Sequence
  Peptide Derived from Human Papillomavirus
ELYLKGSNGR

SEQ ID NO: 44834 - protein, 8 aa, Artificial Sequence
  Peptide Derived from Human Papillomavirus
ETIPAELY

SEQ ID NO: 44835 - protein, 10 aa, Artificial Sequence
  Peptide Derived from Human Papillomavirus
ETIPAELYLK

SEQ ID NO: 44836 - protein, 8 aa, Artificial Sequence
  Peptide Derived from Human Papillomavirus
FARHYFNR

SEQ ID NO: 44837 - protein, 11 aa, Artificial Sequence
  Peptide Derived from Human Papillomavirus
FARHYFNRAGK

SEQ ID NO: 44838 - protein, 9 aa, Artificial Sequence
  Peptide Derived from Human Papillomavirus
FGLPDTNIY

SEQ ID NO: 44839 - protein, 8 aa, Artificial Sequence
  Peptide Derived from Human Papillomavirus
FLMQLGTR

SEQ ID NO: 44840 - protein, 10 aa, Artificial Sequence
  Peptide Derived from Human Papillomavirus
FLMQLGTRSK

SEQ ID NO: 44841 - protein, 8 aa, Artificial Sequence
  Peptide Derived from Human Papillomavirus
FLQMATWR

SEQ ID NO: 44842 - protein, 9 aa, Artificial Sequence
  Peptide Derived from Human Papillomavirus
FNKPYWLQR

SEQ ID NO: 44843 - protein, 9 aa, Artificial Sequence
  Peptide Derived from Human Papillomavirus
FVTVVDTTR

SEQ ID NO: 44844 - protein, 9 aa, Artificial Sequence
  Peptide Derived from Human Papillomavirus
GCTPAMGEH

SEQ ID NO: 44845 - protein, 9 aa, Artificial Sequence
  Peptide Derived from Human Papillomavirus
GDSMWFYLR

SEQ ID NO: 44846 - protein, 10 aa, Artificial Sequence
  Peptide Derived from Human Papillomavirus
GDSMWFYLRR

SEQ ID NO: 44847 - protein, 8 aa, Artificial Sequence
  Peptide Derived from Human Papillomavirus
GFGAMDFK

SEQ ID NO: 44848 - protein, 8 aa, Artificial Sequence
  Peptide Derived from Human Papillomavirus
GLPDTNIY

SEQ ID NO: 44849 - protein, 10 aa, Artificial Sequence
  Peptide Derived from Human Papillomavirus
GLSGHPLFNR

SEQ ID NO: 44850 - protein, 10 aa, Artificial Sequence
  Peptide Derived from Human Papillomavirus
GSSRLLAVGH

SEQ ID NO: 44851 - protein, 11 aa, Artificial Sequence
  Peptide Derived from Human Papillomavirus
IDTGFGAMDFK

SEQ ID NO: 44852 - protein, 9 aa, Artificial Sequence
  Peptide Derived from Human Papillomavirus
IFLQMATWR

SEQ ID NO: 44853 - protein, 9 aa, Artificial Sequence
  Peptide Derived from Human Papillomavirus
IFYHAGSSR

SEQ ID NO: 44854 - protein, 11 aa, Artificial Sequence
  Peptide Derived from Human Papillomavirus
INQYLRHVEEY

SEQ ID NO: 44855 - protein, 10 aa, Artificial Sequence
  Peptide Derived from Human Papillomavirus
ISTATEQLSK

SEQ ID NO: 44856 - protein, 11 aa, Artificial Sequence
  Peptide Derived from Human Papillomavirus
ISTATEQLSKY

SEQ ID NO: 44857 - protein, 10 aa, Artificial Sequence
  Peptide Derived from Human Papillomavirus
ITLSAEVMAY

SEQ ID NO: 44858 - protein, 10 aa, Artificial Sequence
  Peptide Derived from Human Papillomavirus
ITSEAQLFNK

SEQ ID NO: 44859 - protein, 11 aa, Artificial Sequence
  Peptide Derived from Human Papillomavirus
IVGCTPAMGEH

SEQ ID NO: 44860 - protein, 8 aa, Artificial Sequence
  Peptide Derived from Human Papillomavirus
IVQSTCKY

SEQ ID NO: 44861 - protein, 11 aa, Artificial Sequence
  Peptide Derived from Human Papillomavirus
IVQSTCKYPDY

SEQ ID NO: 44862 - protein, 10 aa, Artificial Sequence
  Peptide Derived from Human Papillomavirus
KDNTKTNIPK

SEQ ID NO: 44863 - protein, 10 aa, Artificial Sequence
  Peptide Derived from Human Papillomavirus
KFGLPDTNIY

SEQ ID NO: 44864 - protein, 9 aa, Artificial Sequence
  Peptide Derived from Human Papillomavirus
KFLMQLGTR

SEQ ID NO: 44865 - protein, 11 aa, Artificial Sequence
  Peptide Derived from Human Papillomavirus
KFLMQLGTRSK

SEQ ID NO: 44866 - protein, 8 aa, Artificial Sequence
  Peptide Derived from Human Papillomavirus
KINQYLRH

SEQ ID NO: 44867 - protein, 11 aa, Artificial Sequence
  Peptide Derived from Human Papillomavirus
KITLSAEVMAY

SEQ ID NO: 44868 - protein, 10 aa, Artificial Sequence
  Peptide Derived from Human Papillomavirus
KTNIPKVSAY

SEQ ID NO: 44869 - protein, 11 aa, Artificial Sequence
  Peptide Derived from Human Papillomavirus
KVGETIPAELY

SEQ ID NO: 44870 - protein, 8 aa, Artificial Sequence
  Peptide Derived from Human Papillomavirus
KVSAYQYR

SEQ ID NO: 44871 - protein, 11 aa, Artificial Sequence
  Peptide Derived from Human Papillomavirus
KVSAYQYRVFR

SEQ ID NO: 44872 - protein, 8 aa, Artificial Sequence
  Peptide Derived from Human Papillomavirus
KVVATDSY

SEQ ID NO: 44873 - protein, 10 aa, Artificial Sequence
  Peptide Derived from Human Papillomavirus
KVVATDSYVK

SEQ ID NO: 44874 - protein, 11 aa, Artificial Sequence
  Peptide Derived from Human Papillomavirus
KVVATDSYVKR

SEQ ID NO: 44875 - protein, 11 aa, Artificial Sequence
  Peptide Derived from Human Papillomavirus
KVYLPPTPVSK

SEQ ID NO: 44876 - protein, 11 aa, Artificial Sequence
  Peptide Derived from Human Papillomavirus
LANNNVIEDSR

SEQ ID NO: 44877 - protein, 8 aa, Artificial Sequence
  Peptide Derived from Human Papillomavirus
LAVGHPYY

SEQ ID NO: 44878 - protein, 9 aa, Artificial Sequence
  Peptide Derived from Human Papillomavirus
LDIVQSTCK

SEQ ID NO: 44879 - protein, 10 aa, Artificial Sequence
  Peptide Derived from Human Papillomavirus
LDIVQSTCKY

SEQ ID NO: 44880 - protein, 8 aa, Artificial Sequence
  Peptide Derived from Human Papillomavirus
LDQFPLGR

SEQ ID NO: 44881 - protein, 9 aa, Artificial Sequence
  Peptide Derived from Human Papillomavirus
LDQFPLGRK

SEQ ID NO: 44882 - protein, 9 aa, Artificial Sequence
  Peptide Derived from Human Papillomavirus
LFARHYFNR

SEQ ID NO: 44883 - protein, 10 aa, Artificial Sequence
  Peptide Derived from Human Papillomavirus
LFNKPYWLQR

SEQ ID NO: 44884 - protein, 10 aa, Artificial Sequence
  Peptide Derived from Human Papillomavirus
LFVTVVDTTR

SEQ ID NO: 44885 - protein, 8 aa, Artificial Sequence
  Peptide Derived from Human Papillomavirus
LGAGLSGH

SEQ ID NO: 44886 - protein, 8 aa, Artificial Sequence
  Peptide Derived from Human Papillomavirus
LLAVGHPY

SEQ ID NO: 44887 - protein, 9 aa, Artificial Sequence
  Peptide Derived from Human Papillomavirus
LLAVGHPYY

SEQ ID NO: 44888 - protein, 9 aa, Artificial Sequence
  Peptide Derived from Human Papillomavirus
LMQLGTRSK

SEQ ID NO: 44889 - protein, 8 aa, Artificial Sequence
  Peptide Derived from Human Papillomavirus
LSAEVMAY

SEQ ID NO: 44890 - protein, 10 aa, Artificial Sequence
  Peptide Derived from Human Papillomavirus
LSAEVMAYLH

SEQ ID NO: 44891 - protein, 9 aa, Artificial Sequence
  Peptide Derived from Human Papillomavirus
LSGHPLFNR

SEQ ID NO: 44892 - protein, 8 aa, Artificial Sequence
  Peptide Derived from Human Papillomavirus
LSKYDARK

SEQ ID NO: 44893 - protein, 10 aa, Artificial Sequence
  Peptide Derived from Human Papillomavirus
MATWRPSENK

SEQ ID NO: 44894 - protein, 10 aa, Artificial Sequence
  Peptide Derived from Human Papillomavirus
MDFKVLQESK

SEQ ID NO: 44895 - protein, 11 aa, Artificial Sequence
  Peptide Derived from Human Papillomavirus
MITSEAQLFNK

SEQ ID NO: 44896 - protein, 8 aa, Artificial Sequence
  Peptide Derived from Human Papillomavirus
MLPMMYIY

SEQ ID NO: 44897 - protein, 9 aa, Artificial Sequence
  Peptide Derived from Human Papillomavirus
MLPMMYIYR

SEQ ID NO: 44898 - protein, 9 aa, Artificial Sequence
  Peptide Derived from Human Papillomavirus
MMLPMMYIY

SEQ ID NO: 44899 - protein, 10 aa, Artificial Sequence
  Peptide Derived from Human Papillomavirus
MMLPMMYIYR

SEQ ID NO: 44900 - protein, 11 aa, Artificial Sequence
  Peptide Derived from Human Papillomavirus
MMYIYRDPPLH

SEQ ID NO: 44901 - protein, 11 aa, Artificial Sequence
  Peptide Derived from Human Papillomavirus
NGREPPPSSVY

SEQ ID NO: 44902 - protein, 8 aa, Artificial Sequence
  Peptide Derived from Human Papillomavirus
NIPKVSAY

SEQ ID NO: 44903 - protein, 10 aa, Artificial Sequence
  Peptide Derived from Human Papillomavirus
NIPKVSAYQY

SEQ ID NO: 44904 - protein, 11 aa, Artificial Sequence
  Peptide Derived from Human Papillomavirus
NIPKVSAYQYR

SEQ ID NO: 44905 - protein, 9 aa, Artificial Sequence
  Peptide Derived from Human Papillomavirus
NIYNPDQER

SEQ ID NO: 44906 - protein, 9 aa, Artificial Sequence
  Peptide Derived from Human Papillomavirus
NNNVIEDSR

SEQ ID NO: 44907 - protein, 8 aa, Artificial Sequence
  Peptide Derived from Human Papillomavirus
NNVIEDSR

SEQ ID NO: 44908 - protein, 8 aa, Artificial Sequence
  Peptide Derived from Human Papillomavirus
NTKTNIPK

SEQ ID NO: 44909 - protein, 9 aa, Artificial Sequence
  Peptide Derived from Human Papillomavirus
PAMGEHWTK

SEQ ID NO: 44910 - protein, 8 aa, Artificial Sequence
  Peptide Derived from Human Papillomavirus
PAVATSKK

SEQ ID NO: 44911 - protein, 9 aa, Artificial Sequence
  Peptide Derived from Human Papillomavirus
PAVATSKKR

SEQ ID NO: 44912 - protein, 11 aa, Artificial Sequence
  Peptide Derived from Human Papillomavirus
PDYLKMSADAY

SEQ ID NO: 44913 - protein, 10 aa, Artificial Sequence
  Peptide Derived from Human Papillomavirus
PIFLQMATWR

SEQ ID NO: 44914 - protein, 10 aa, Artificial Sequence
  Peptide Derived from Human Papillomavirus
PLDIVQSTCK

SEQ ID NO: 44915 - protein, 11 aa, Artificial Sequence
  Peptide Derived from Human Papillomavirus
PLDIVQSTCKY

SEQ ID NO: 44916 - protein, 9 aa, Artificial Sequence
  Peptide Derived from Human Papillomavirus
PLGAGLSGH

SEQ ID NO: 44917 - protein, 10 aa, Artificial Sequence
  Peptide Derived from Human Papillomavirus
PTEKQDPLAK

SEQ ID NO: 44918 - protein, 11 aa, Artificial Sequence
  Peptide Derived from Human Papillomavirus
PTEKQDPLAKY

SEQ ID NO: 44919 - protein, 9 aa, Artificial Sequence
  Peptide Derived from Human Papillomavirus
PTSTSTPAK

SEQ ID NO: 44920 - protein, 10 aa, Artificial Sequence
  Peptide Derived from Human Papillomavirus
PTSTSTPAKR

SEQ ID NO: 44921 - protein, 11 aa, Artificial Sequence
  Peptide Derived from Human Papillomavirus
PTSTSTPAKRK

SEQ ID NO: 44922 - protein, 9 aa, Artificial Sequence
  Peptide Derived from Human Papillomavirus
PVATSLEDK

SEQ ID NO: 44923 - protein, 10 aa, Artificial Sequence
  Peptide Derived from Human Papillomavirus
PVATSLEDKY

SEQ ID NO: 44924 - protein, 11 aa, Artificial Sequence
  Peptide Derived from Human Papillomavirus
PVATSLEDKYR

SEQ ID NO: 44925 - protein, 11 aa, Artificial Sequence
  Peptide Derived from Human Papillomavirus
PVSKVVATDSY

SEQ ID NO: 44926 - protein, 8 aa, Artificial Sequence
  Peptide Derived from Human Papillomavirus
QDPLAKYK

SEQ ID NO: 44927 - protein, 8 aa, Artificial Sequence
  Peptide Derived from Human Papillomavirus
QFVFQLCK

SEQ ID NO: 44928 - protein, 10 aa, Artificial Sequence
  Peptide Derived from Human Papillomavirus
QLFARHYFNR

SEQ ID NO: 44929 - protein, 11 aa, Artificial Sequence
  Peptide Derived from Human Papillomavirus
QLFNKPYWLQR

SEQ ID NO: 44930 - protein, 11 aa, Artificial Sequence
  Peptide Derived from Human Papillomavirus
QLFVTVVDTTR

SEQ ID NO: 44931 - protein, 8 aa, Artificial Sequence
  Peptide Derived from Human Papillomavirus
QLSKYDAR

SEQ ID NO: 44932 - protein, 9 aa, Artificial Sequence
  Peptide Derived from Human Papillomavirus
QLSKYDARK

SEQ ID NO: 44933 - protein, 11 aa, Artificial Sequence
  Peptide Derived from Human Papillomavirus
QMATWRPSENK

SEQ ID NO: 44934 - protein, 9 aa, Artificial Sequence
  Peptide Derived from Human Papillomavirus
QSTCKYPDY

SEQ ID NO: 44935 - protein, 11 aa, Artificial Sequence
  Peptide Derived from Human Papillomavirus
QSTCKYPDYLK

SEQ ID NO: 44936 - protein, 9 aa, Artificial Sequence
  Peptide Derived from Human Papillomavirus
RDNISVDGK

SEQ ID NO: 44937 - protein, 9 aa, Artificial Sequence
  Peptide Derived from Human Papillomavirus
RLLAVGHPY

SEQ ID NO: 44938 - protein, 10 aa, Artificial Sequence
  Peptide Derived from Human Papillomavirus
RLLAVGHPYY

SEQ ID NO: 44939 - protein, 10 aa, Artificial Sequence
  Peptide Derived from Human Papillomavirus
RSKPAVATSK

SEQ ID NO: 44940 - protein, 11 aa, Artificial Sequence
  Peptide Derived from Human Papillomavirus
RSKPAVATSKK

SEQ ID NO: 44941 - protein, 9 aa, Artificial Sequence
  Peptide Derived from Human Papillomavirus
RSTAITCQR

SEQ ID NO: 44942 - protein, 9 aa, Artificial Sequence
  Peptide Derived from Human Papillomavirus
RVRLPDPNK

SEQ ID NO: 44943 - protein, 9 aa, Artificial Sequence
  Peptide Derived from Human Papillomavirus
SAEVMAYLH

SEQ ID NO: 44944 - protein, 11 aa, Artificial Sequence
  Peptide Derived from Human Papillomavirus
SAPTSTSTPAK

SEQ ID NO: 44945 - protein, 9 aa, Artificial Sequence
  Peptide Derived from Human Papillomavirus
SAYQYRVFR

SEQ ID NO: 44946 - protein, 11 aa, Artificial Sequence
  Peptide Derived from Human Papillomavirus
SAYQYRVFRVR

SEQ ID NO: 44947 - protein, 8 aa, Artificial Sequence
  Peptide Derived from Human Papillomavirus
SGHPLFNR

SEQ ID NO: 44948 - protein, 10 aa, Artificial Sequence
  Peptide Derived from Human Papillomavirus
SIFYHAGSSR

SEQ ID NO: 44949 - protein, 8 aa, Artificial Sequence
  Peptide Derived from Human Papillomavirus
SLEDKYRY

SEQ ID NO: 44950 - protein, 10 aa, Artificial Sequence
  Peptide Derived from Human Papillomavirus
SLEDKYRYVR

SEQ ID NO: 44951 - protein, 8 aa, Artificial Sequence
  Peptide Derived from Human Papillomavirus
SMWFYLRR

SEQ ID NO: 44952 - protein, 9 aa, Artificial Sequence
  Peptide Derived from Human Papillomavirus
SSRLLAVGH

SEQ ID NO: 44953 - protein, 11 aa, Artificial Sequence
  Peptide Derived from Human Papillomavirus
SSRLLAVGHPY

SEQ ID NO: 44954 - protein, 8 aa, Artificial Sequence
  Peptide Derived from Human Papillomavirus
STAITCQR

SEQ ID NO: 44955 - protein, 9 aa, Artificial Sequence
  Peptide Derived from Human Papillomavirus
STATEQLSK

SEQ ID NO: 44956 - protein, 10 aa, Artificial Sequence
  Peptide Derived from Human Papillomavirus
STATEQLSKY

SEQ ID NO: 44957 - protein, 8 aa, Artificial Sequence
  Peptide Derived from Human Papillomavirus
STCKYPDY

SEQ ID NO: 44958 - protein, 10 aa, Artificial Sequence
  Peptide Derived from Human Papillomavirus
STCKYPDYLK

SEQ ID NO: 44959 - protein, 11 aa, Artificial Sequence
  Peptide Derived from Human Papillomavirus
STDLDQFPLGR

SEQ ID NO: 44960 - protein, 8 aa, Artificial Sequence
  Peptide Derived from Human Papillomavirus
STPAKRKR

SEQ ID NO: 44961 - protein, 9 aa, Artificial Sequence
  Peptide Derived from Human Papillomavirus
STPAKRKRR

SEQ ID NO: 44962 - protein, 8 aa, Artificial Sequence
  Peptide Derived from Human Papillomavirus
STSTPAKR

SEQ ID NO: 44963 - protein, 9 aa, Artificial Sequence
  Peptide Derived from Human Papillomavirus
STSTPAKRK

SEQ ID NO: 44964 - protein, 10 aa, Artificial Sequence
  Peptide Derived from Human Papillomavirus
STSTPAKRKR

SEQ ID NO: 44965 - protein, 11 aa, Artificial Sequence
  Peptide Derived from Human Papillomavirus
STSTPAKRKRR

SEQ ID NO: 44966 - protein, 8 aa, Artificial Sequence
  Peptide Derived from Human Papillomavirus
SVTKDNTK

SEQ ID NO: 44967 - protein, 8 aa, Artificial Sequence
  Peptide Derived from Human Papillomavirus
TATEQLSK

SEQ ID NO: 44968 - protein, 9 aa, Artificial Sequence
  Peptide Derived from Human Papillomavirus
TATEQLSKY

SEQ ID NO: 44969 - protein, 9 aa, Artificial Sequence
  Peptide Derived from Human Papillomavirus
TCKYPDYLK

SEQ ID NO: 44970 - protein, 11 aa, Artificial Sequence
  Peptide Derived from Human Papillomavirus
TCQREQPPTEK

SEQ ID NO: 44971 - protein, 10 aa, Artificial Sequence
  Peptide Derived from Human Papillomavirus
TDLDQFPLGR

SEQ ID NO: 44972 - protein, 11 aa, Artificial Sequence
  Peptide Derived from Human Papillomavirus
TDLDQFPLGRK

SEQ ID NO: 44973 - protein, 9 aa, Artificial Sequence
  Peptide Derived from Human Papillomavirus
TGFGAMDFK

SEQ ID NO: 44974 - protein, 9 aa, Artificial Sequence
  Peptide Derived from Human Papillomavirus
TIPAELYLK

SEQ ID NO: 44975 - protein, 11 aa, Artificial Sequence
  Peptide Derived from Human Papillomavirus
TISTATEQLSK

SEQ ID NO: 44976 - protein, 9 aa, Artificial Sequence
  Peptide Derived from Human Papillomavirus
TLSAEVMAY

SEQ ID NO: 44977 - protein, 11 aa, Artificial Sequence
  Peptide Derived from Human Papillomavirus
TLSAEVMAYLH

SEQ ID NO: 44978 - protein, 9 aa, Artificial Sequence
  Peptide Derived from Human Papillomavirus
TNIPKVSAY

SEQ ID NO: 44979 - protein, 11 aa, Artificial Sequence
  Peptide Derived from Human Papillomavirus
TNIPKVSAYQY

SEQ ID NO: 44980 - protein, 10 aa, Artificial Sequence
  Peptide Derived from Human Papillomavirus
TNIYNPDQER

SEQ ID NO: 44981 - protein, 9 aa, Artificial Sequence
  Peptide Derived from Human Papillomavirus
TSEAQLFNK

SEQ ID NO: 44982 - protein, 11 aa, Artificial Sequence
  Peptide Derived from Human Papillomavirus
TSEAQLFNKPY

SEQ ID NO: 44983 - protein, 11 aa, Artificial Sequence
  Peptide Derived from Human Papillomavirus
TSIFYHAGSSR

SEQ ID NO: 44984 - protein, 8 aa, Artificial Sequence
  Peptide Derived from Human Papillomavirus
TSLEDKYR

SEQ ID NO: 44985 - protein, 9 aa, Artificial Sequence
  Peptide Derived from Human Papillomavirus
TSLEDKYRY

SEQ ID NO: 44986 - protein, 11 aa, Artificial Sequence
  Peptide Derived from Human Papillomavirus
TSLEDKYRYVR

SEQ ID NO: 44987 - protein, 8 aa, Artificial Sequence
  Peptide Derived from Human Papillomavirus
TSTPAKRK

SEQ ID NO: 44988 - protein, 9 aa, Artificial Sequence
  Peptide Derived from Human Papillomavirus
TSTPAKRKR

SEQ ID NO: 44989 - protein, 10 aa, Artificial Sequence
  Peptide Derived from Human Papillomavirus
TSTPAKRKRR

SEQ ID NO: 44990 - protein, 8 aa, Artificial Sequence
  Peptide Derived from Human Papillomavirus
TSTSTPAK

SEQ ID NO: 44991 - protein, 9 aa, Artificial Sequence
  Peptide Derived from Human Papillomavirus
TSTSTPAKR

SEQ ID NO: 44992 - protein, 10 aa, Artificial Sequence
  Peptide Derived from Human Papillomavirus
TSTSTPAKRK

SEQ ID NO: 44993 - protein, 11 aa, Artificial Sequence
  Peptide Derived from Human Papillomavirus
TSTSTPAKRKR

SEQ ID NO: 44994 - protein, 8 aa, Artificial Sequence
  Peptide Derived from Human Papillomavirus
VATDSYVK

SEQ ID NO: 44995 - protein, 9 aa, Artificial Sequence
  Peptide Derived from Human Papillomavirus
VATDSYVKR

SEQ ID NO: 44996 - protein, 8 aa, Artificial Sequence
  Peptide Derived from Human Papillomavirus
VATSLEDK

SEQ ID NO: 44997 - protein, 9 aa, Artificial Sequence
  Peptide Derived from Human Papillomavirus
VATSLEDKY

SEQ ID NO: 44998 - protein, 10 aa, Artificial Sequence
  Peptide Derived from Human Papillomavirus
VATSLEDKYR

SEQ ID NO: 44999 - protein, 11 aa, Artificial Sequence
  Peptide Derived from Human Papillomavirus
VATSLEDKYRY

SEQ ID NO: 45000 - protein, 11 aa, Artificial Sequence
  Peptide Derived from Human Papillomavirus
VFRVRLPDPNK

SEQ ID NO: 45001 - protein, 10 aa, Artificial Sequence
  Peptide Derived from Human Papillomavirus
VGCTPAMGEH

SEQ ID NO: 45002 - protein, 10 aa, Artificial Sequence
  Peptide Derived from Human Papillomavirus
VGETIPAELY

SEQ ID NO: 45003 - protein, 10 aa, Artificial Sequence
  Peptide Derived from Human Papillomavirus
VGHPYYSVTK

SEQ ID NO: 45004 - protein, 10 aa, Artificial Sequence
  Peptide Derived from Human Papillomavirus
VSAYQYRVFR

SEQ ID NO: 45005 - protein, 10 aa, Artificial Sequence
  Peptide Derived from Human Papillomavirus
VSKVVATDSY

SEQ ID NO: 45006 - protein, 8 aa, Artificial Sequence
  Peptide Derived from Human Papillomavirus
VTVVDTTR

SEQ ID NO: 45007 - protein, 9 aa, Artificial Sequence
  Peptide Derived from Human Papillomavirus
VVATDSYVK

SEQ ID NO: 45008 - protein, 10 aa, Artificial Sequence
  Peptide Derived from Human Papillomavirus
VVATDSYVKR

SEQ ID NO: 45009 - protein, 10 aa, Artificial Sequence
  Peptide Derived from Human Papillomavirus
WACVGLEVGR

SEQ ID NO: 45010 - protein, 8 aa, Artificial Sequence
  Peptide Derived from Human Papillomavirus
WLQRAQGH

SEQ ID NO: 45011 - protein, 8 aa, Artificial Sequence
  Peptide Derived from Human Papillomavirus
WTKGAVCK

SEQ ID NO: 45012 - protein, 9 aa, Artificial Sequence
  Peptide Derived from Human Papillomavirus
YDARKINQY

SEQ ID NO: 45013 - protein, 11 aa, Artificial Sequence
  Peptide Derived from Human Papillomavirus
YDARKINQYLR

SEQ ID NO: 45014 - protein, 8 aa, Artificial Sequence
  Peptide Derived from Human Papillomavirus
YGDSMWFY

SEQ ID NO: 45015 - protein, 10 aa, Artificial Sequence
  Peptide Derived from Human Papillomavirus
YGDSMWFYLR

SEQ ID NO: 45016 - protein, 11 aa, Artificial Sequence
  Peptide Derived from Human Papillomavirus
YGDSMWFYLRR

SEQ ID NO: 45017 - protein, 9 aa, Artificial Sequence
  Peptide Derived from Human Papillomavirus
YIYRDPPLH

SEQ ID NO: 45018 - protein, 10 aa, Artificial Sequence
  Peptide Derived from Human Papillomavirus
YIYRDPPLHY

SEQ ID NO: 45019 - protein, 8 aa, Artificial Sequence
  Peptide Derived from Human Papillomavirus
YLKGSNGR

SEQ ID NO: 45020 - protein, 9 aa, Artificial Sequence
  Peptide Derived from Human Papillomavirus
YLKMSADAY

SEQ ID NO: 45021 - protein, 9 aa, Artificial Sequence
  Peptide Derived from Human Papillomavirus
YLPPTPVSK

SEQ ID NO: 45022 - protein, 8 aa, Artificial Sequence
  Peptide Derived from Human Papillomavirus
YLRHVEEY

SEQ ID NO: 45023 - protein, 10 aa, Artificial Sequence
  Peptide Derived from Human Papillomavirus
YLRREQLFAR

SEQ ID NO: 45024 - protein, 11 aa, Artificial Sequence
  Peptide Derived from Human Papillomavirus
YLRREQLFARH

SEQ ID NO: 45025 - protein, 9 aa, Artificial Sequence
  Peptide Derived from Human Papillomavirus
YSVTKDNTK

SEQ ID NO: 45026 - protein, 9 aa, Artificial Sequence
  Peptide Derived from Human Papillomavirus
YVKRTSIFY

SEQ ID NO: 45027 - protein, 10 aa, Artificial Sequence
  Peptide Derived from Human Papillomavirus
YVKRTSIFYH

SEQ ID NO: 45028 - protein, 11 aa, Artificial Sequence
  Peptide Derived from Human Papillomavirus
YVRSTAITCQR

SEQ ID NO: 45029 - protein, 8 aa, Artificial Sequence
  Peptide Derived from Human Papillomavirus
AAPRLYRK

SEQ ID NO: 45030 - protein, 10 aa, Artificial Sequence
  Peptide Derived from Human Papillomavirus
AFTTRRGGVR

SEQ ID NO: 45031 - protein, 9 aa, Artificial Sequence
  Peptide Derived from Human Papillomavirus
AGYVPLGSR

SEQ ID NO: 45032 - protein, 10 aa, Artificial Sequence
  Peptide Derived from Human Papillomavirus
ALHRPAFTTR

SEQ ID NO: 45033 - protein, 11 aa, Artificial Sequence
  Peptide Derived from Human Papillomavirus
ALHRPAFTTRR

SEQ ID NO: 45034 - protein, 9 aa, Artificial Sequence
  Peptide Derived from Human Papillomavirus
ALWPVYFFR

SEQ ID NO: 45035 - protein, 10 aa, Artificial Sequence
  Peptide Derived from Human Papillomavirus
ALWPVYFFRR

SEQ ID NO: 45036 - protein, 11 aa, Artificial Sequence
  Peptide Derived from Human Papillomavirus
ALWPVYFFRRR

SEQ ID NO: 45037 - protein, 9 aa, Artificial Sequence
  Peptide Derived from Human Papillomavirus
ANNSFDGLY

SEQ ID NO: 45038 - protein, 8 aa, Artificial Sequence
  Peptide Derived from Human Papillomavirus
ASATQLYK

SEQ ID NO: 45039 - protein, 11 aa, Artificial Sequence
  Peptide Derived from Human Papillomavirus
ASATQLYKTCK

SEQ ID NO: 45040 - protein, 10 aa, Artificial Sequence
  Peptide Derived from Human Papillomavirus
ATPSAHLPIK

SEQ ID NO: 45041 - protein, 9 aa, Artificial Sequence
  Peptide Derived from Human Papillomavirus
ATQLYKTCK

SEQ ID NO: 45042 - protein, 9 aa, Artificial Sequence
  Peptide Derived from Human Papillomavirus
DFMNIVALH

SEQ ID NO: 45043 - protein, 10 aa, Artificial Sequence
  Peptide Derived from Human Papillomavirus
DFMNIVALHR

SEQ ID NO: 45044 - protein, 10 aa, Artificial Sequence
  Peptide Derived from Human Papillomavirus
DITPTSSTVH

SEQ ID NO: 45045 - protein, 9 aa, Artificial Sequence
  Peptide Derived from Human Papillomavirus
DVVNKIEQK

SEQ ID NO: 45046 - protein, 10 aa, Artificial Sequence
  Peptide Derived from Human Papillomavirus
EDVVNKIEQK

SEQ ID NO: 45047 - protein, 10 aa, Artificial Sequence
  Peptide Derived from Human Papillomavirus
EIPMQTFAVH

SEQ ID NO: 45048 - protein, 10 aa, Artificial Sequence
  Peptide Derived from Human Papillomavirus
FALWPVYFFR

SEQ ID NO: 45049 - protein, 11 aa, Artificial Sequence
  Peptide Derived from Human Papillomavirus
FALWPVYFFRR

SEQ ID NO: 45050 - protein, 8 aa, Artificial Sequence
  Peptide Derived from Human Papillomavirus
FDGLYDIY

SEQ ID NO: 45051 - protein, 8 aa, Artificial Sequence
  Peptide Derived from Human Papillomavirus
FFRRRRRK

SEQ ID NO: 45052 - protein, 9 aa, Artificial Sequence
  Peptide Derived from Human Papillomavirus
FFRRRRRKR

SEQ ID NO: 45053 - protein, 8 aa, Artificial Sequence
  Peptide Derived from Human Papillomavirus
FMNIVALH

SEQ ID NO: 45054 - protein, 9 aa, Artificial Sequence
  Peptide Derived from Human Papillomavirus
FMNIVALHR

SEQ ID NO: 45055 - protein, 9 aa, Artificial Sequence
  Peptide Derived from Human Papillomavirus
FTTRRGGVR

SEQ ID NO: 45056 - protein, 11 aa, Artificial Sequence
  Peptide Derived from Human Papillomavirus
FVPQSPYDVTH

SEQ ID NO: 45057 - protein, 8 aa, Artificial Sequence
  Peptide Derived from Human Papillomavirus
GARVHYYY

SEQ ID NO: 45058 - protein, 9 aa, Artificial Sequence
  Peptide Derived from Human Papillomavirus
GFRRIAAPR

SEQ ID NO: 45059 - protein, 11 aa, Artificial Sequence
  Peptide Derived from Human Papillomavirus
GFRRIAAPRLY

SEQ ID NO: 45060 - protein, 10 aa, Artificial Sequence
  Peptide Derived from Human Papillomavirus
GGVRFSRLGR

SEQ ID NO: 45061 - protein, 11 aa, Artificial Sequence
  Peptide Derived from Human Papillomavirus
GGVRFSRLGRK

SEQ ID NO: 45062 - protein, 11 aa, Artificial Sequence
  Peptide Derived from Human Papillomavirus
GIGTGTGSGGR

SEQ ID NO: 45063 - protein, 9 aa, Artificial Sequence
  Peptide Derived from Human Papillomavirus
GNVWETPFY

SEQ ID NO: 45064 - protein, 8 aa, Artificial Sequence
  Peptide Derived from Human Papillomavirus
GSGGRAGY

SEQ ID NO: 45065 - protein, 10 aa, Artificial Sequence
  Peptide Derived from Human Papillomavirus
GSSFALWPVY

SEQ ID NO: 45066 - protein, 10 aa, Artificial Sequence
  Peptide Derived from Human Papillomavirus
GTCPEDVVNK

SEQ ID NO: 45067 - protein, 10 aa, Artificial Sequence
  Peptide Derived from Human Papillomavirus
GTGSGGRAGY

SEQ ID NO: 45068 - protein, 9 aa, Artificial Sequence
  Peptide Derived from Human Papillomavirus
GTGTGSGGR

SEQ ID NO: 45069 - protein, 9 aa, Artificial Sequence
  Peptide Derived from Human Papillomavirus
GTQIGARVH

SEQ ID NO: 45070 - protein, 10 aa, Artificial Sequence
  Peptide Derived from Human Papillomavirus
GTQIGARVHY

SEQ ID NO: 45071 - protein, 11 aa, Artificial Sequence
  Peptide Derived from Human Papillomavirus
GTQIGARVHYY

SEQ ID NO: 45072 - protein, 9 aa, Artificial Sequence
  Peptide Derived from Human Papillomavirus
GVRFSRLGR

SEQ ID NO: 45073 - protein, 10 aa, Artificial Sequence
  Peptide Derived from Human Papillomavirus
GVRFSRLGRK

SEQ ID NO: 45074 - protein, 8 aa, Artificial Sequence
  Peptide Derived from Human Papillomavirus
IAAPRLYR

SEQ ID NO: 45075 - protein, 9 aa, Artificial Sequence
  Peptide Derived from Human Papillomavirus
IAAPRLYRK

SEQ ID NO: 45076 - protein, 8 aa, Artificial Sequence
  Peptide Derived from Human Papillomavirus
IGARVHYY

SEQ ID NO: 45077 - protein, 9 aa, Artificial Sequence
  Peptide Derived from Human Papillomavirus
IGARVHYYY

SEQ ID NO: 45078 - protein, 10 aa, Artificial Sequence
  Peptide Derived from Human Papillomavirus
IGTGTGSGGR

SEQ ID NO: 45079 - protein, 11 aa, Artificial Sequence
  Peptide Derived from Human Papillomavirus
ILISTPTSGIH

SEQ ID NO: 45080 - protein, 10 aa, Artificial Sequence
  Peptide Derived from Human Papillomavirus
ILQWGSLFTY

SEQ ID NO: 45081 - protein, 10 aa, Artificial Sequence
  Peptide Derived from Human Papillomavirus
ISSTPIPGFR

SEQ ID NO: 45082 - protein, 11 aa, Artificial Sequence
  Peptide Derived from Human Papillomavirus
ISSTPIPGFRR

SEQ ID NO: 45083 - protein, 9 aa, Artificial Sequence
  Peptide Derived from Human Papillomavirus
ISTPTSGIH

SEQ ID NO: 45084 - protein, 11 aa, Artificial Sequence
  Peptide Derived from Human Papillomavirus
ISTPTSGIHSY

SEQ ID NO: 45085 - protein, 9 aa, Artificial Sequence
  Peptide Derived from Human Papillomavirus
ITPTSSTVH

SEQ ID NO: 45086 - protein, 8 aa, Artificial Sequence
  Peptide Derived from Human Papillomavirus
IVDVTPAR

SEQ ID NO: 45087 - protein, 8 aa, Artificial Sequence
  Peptide Derived from Human Papillomavirus
KATIQTRR

SEQ ID NO: 45088 - protein, 10 aa, Artificial Sequence
  Peptide Derived from Human Papillomavirus
KIEQKTWADK

SEQ ID NO: 45089 - protein, 11 aa, Artificial Sequence
  Peptide Derived from Human Papillomavirus
KILQWGSLFTY

SEQ ID NO: 45090 - protein, 10 aa, Artificial Sequence
  Peptide Derived from Human Papillomavirus
KVTDPAFLDR

SEQ ID NO: 45091 - protein, 11 aa, Artificial Sequence
  Peptide Derived from Human Papillomavirus
LDITPTSSTVH

SEQ ID NO: 45092 - protein, 10 aa, Artificial Sequence
  Peptide Derived from Human Papillomavirus
LGNVWETPFY

SEQ ID NO: 45093 - protein, 10 aa, Artificial Sequence
  Peptide Derived from Human Papillomavirus
LGRKATIQTR

SEQ ID NO: 45094 - protein, 11 aa, Artificial Sequence
  Peptide Derived from Human Papillomavirus
LGRKATIQTRR

SEQ ID NO: 45095 - protein, 10 aa, Artificial Sequence
  Peptide Derived from Human Papillomavirus
LISTPTSGIH

SEQ ID NO: 45096 - protein, 11 aa, Artificial Sequence
  Peptide Derived from Human Papillomavirus
LSANNSFDGLY

SEQ ID NO: 45097 - protein, 8 aa, Artificial Sequence
  Peptide Derived from Human Papillomavirus
MNIVALHR

SEQ ID NO: 45098 - protein, 8 aa, Artificial Sequence
  Peptide Derived from Human Papillomavirus
MVAHRATR

SEQ ID NO: 45099 - protein, 9 aa, Artificial Sequence
  Peptide Derived from Human Papillomavirus
MVAHRATRR

SEQ ID NO: 45100 - protein, 10 aa, Artificial Sequence
  Peptide Derived from Human Papillomavirus
MVAHRATRRK

SEQ ID NO: 45101 - protein, 11 aa, Artificial Sequence
  Peptide Derived from Human Papillomavirus
MVAHRATRRKR

SEQ ID NO: 45102 - protein, 8 aa, Artificial Sequence
  Peptide Derived from Human Papillomavirus
NNSFDGLY

SEQ ID NO: 45103 - protein, 11 aa, Artificial Sequence
  Peptide Derived from Human Papillomavirus
NNSFDGLYDIY

SEQ ID NO: 45104 - protein, 10 aa, Artificial Sequence
  Peptide Derived from Human Papillomavirus
NSFDGLYDIY

SEQ ID NO: 45105 - protein, 8 aa, Artificial Sequence
  Peptide Derived from Human Papillomavirus
NVWETPFY

SEQ ID NO: 45106 - protein, 11 aa, Artificial Sequence
  Peptide Derived from Human Papillomavirus
PAFTTRRGGVR

SEQ ID NO: 45107 - protein, 10 aa, Artificial Sequence
  Peptide Derived from Human Papillomavirus
PDFMNIVALH

SEQ ID NO: 45108 - protein, 11 aa, Artificial Sequence
  Peptide Derived from Human Papillomavirus
PDFMNIVALHR

SEQ ID NO: 45109 - protein, 8 aa, Artificial Sequence
  Peptide Derived from Human Papillomavirus
PFVPQSPY

SEQ ID NO: 45110 - protein, 10 aa, Artificial Sequence
  Peptide Derived from Human Papillomavirus
PGFRRIAAPR

SEQ ID NO: 45111 - protein, 11 aa, Artificial Sequence
  Peptide Derived from Human Papillomavirus
PISSTPIPGFR

SEQ ID NO: 45112 - protein, 11 aa, Artificial Sequence
  Peptide Derived from Human Papillomavirus
PLGNVWETPFY

SEQ ID NO: 45113 - protein, 8 aa, Artificial Sequence
  Peptide Derived from Human Papillomavirus
PMQTFAVH

SEQ ID NO: 45114 - protein, 8 aa, Artificial Sequence
  Peptide Derived from Human Papillomavirus
PSAHLPIK

SEQ ID NO: 45115 - protein, 11 aa, Artificial Sequence
  Peptide Derived from Human Papillomavirus
PSTIVDVTPAR

SEQ ID NO: 45116 - protein, 8 aa, Artificial Sequence
  Peptide Derived from Human Papillomavirus
PTSGIHSY

SEQ ID NO: 45117 - protein, 8 aa, Artificial Sequence
  Peptide Derived from Human Papillomavirus
PVYFFRRR

SEQ ID NO: 45118 - protein, 9 aa, Artificial Sequence
  Peptide Derived from Human Papillomavirus
PVYFFRRRR

SEQ ID NO: 45119 - protein, 10 aa, Artificial Sequence
  Peptide Derived from Human Papillomavirus
PVYFFRRRRR

SEQ ID NO: 45120 - protein, 11 aa, Artificial Sequence
  Peptide Derived from Human Papillomavirus
PVYFFRRRRRK

SEQ ID NO: 45121 - protein, 11 aa, Artificial Sequence
  Peptide Derived from Human Papillomavirus
QGSSFALWPVY

SEQ ID NO: 45122 - protein, 8 aa, Artificial Sequence
  Peptide Derived from Human Papillomavirus
QIGARVHY

SEQ ID NO: 45123 - protein, 9 aa, Artificial Sequence
  Peptide Derived from Human Papillomavirus
QIGARVHYY

SEQ ID NO: 45124 - protein, 10 aa, Artificial Sequence
  Peptide Derived from Human Papillomavirus
QIGARVHYYY

SEQ ID NO: 45125 - protein, 8 aa, Artificial Sequence
  Peptide Derived from Human Papillomavirus
QSPYDVTH

SEQ ID NO: 45126 - protein, 11 aa, Artificial Sequence
  Peptide Derived from Human Papillomavirus
QSPYDVTHDVY

SEQ ID NO: 45127 - protein, 9 aa, Artificial Sequence
  Peptide Derived from Human Papillomavirus
QSVATPSAH

SEQ ID NO: 45128 - protein, 11 aa, Artificial Sequence
  Peptide Derived from Human Papillomavirus
QTRRGTQIGAR

SEQ ID NO: 45129 - protein, 10 aa, Artificial Sequence
  Peptide Derived from Human Papillomavirus
RAGYVPLGSR

SEQ ID NO: 45130 - protein, 8 aa, Artificial Sequence
  Peptide Derived from Human Papillomavirus
RASATQLY

SEQ ID NO: 45131 - protein, 9 aa, Artificial Sequence
  Peptide Derived from Human Papillomavirus
RASATQLYK

SEQ ID NO: 45132 - protein, 8 aa, Artificial Sequence
  Peptide Derived from Human Papillomavirus
RFSRLGRK

SEQ ID NO: 45133 - protein, 8 aa, Artificial Sequence
  Peptide Derived from Human Papillomavirus
RGGVRFSR

SEQ ID NO: 45134 - protein, 11 aa, Artificial Sequence
  Peptide Derived from Human Papillomavirus
RGGVRFSRLGR

SEQ ID NO: 45135 - protein, 8 aa, Artificial Sequence
  Peptide Derived from Human Papillomavirus
RGTQIGAR

SEQ ID NO: 45136 - protein, 10 aa, Artificial Sequence
  Peptide Derived from Human Papillomavirus
RGTQIGARVH

SEQ ID NO: 45137 - protein, 11 aa, Artificial Sequence
  Peptide Derived from Human Papillomavirus
RGTQIGARVHY

SEQ ID NO: 45138 - protein, 8 aa, Artificial Sequence
  Peptide Derived from Human Papillomavirus
RIAAPRLY

SEQ ID NO: 45139 - protein, 9 aa, Artificial Sequence
  Peptide Derived from Human Papillomavirus
RIAAPRLYR

SEQ ID NO: 45140 - protein, 10 aa, Artificial Sequence
  Peptide Derived from Human Papillomavirus
RIAAPRLYRK

SEQ ID NO: 45141 - protein, 11 aa, Artificial Sequence
  Peptide Derived from Human Papillomavirus
RLGRKATIQTR

SEQ ID NO: 45142 - protein, 11 aa, Artificial Sequence
  Peptide Derived from Human Papillomavirus
RLYRKAFQQVK

SEQ ID NO: 45143 - protein, 10 aa, Artificial Sequence
  Peptide Derived from Human Papillomavirus
SANNSFDGLY

SEQ ID NO: 45144 - protein, 10 aa, Artificial Sequence
  Peptide Derived from Human Papillomavirus
SATQLYKTCK

SEQ ID NO: 45145 - protein, 8 aa, Artificial Sequence
  Peptide Derived from Human Papillomavirus
SFALWPVY

SEQ ID NO: 45146 - protein, 11 aa, Artificial Sequence
  Peptide Derived from Human Papillomavirus
SFALWPVYFFR

SEQ ID NO: 45147 - protein, 9 aa, Artificial Sequence
  Peptide Derived from Human Papillomavirus
SFDGLYDIY

SEQ ID NO: 45148 - protein, 11 aa, Artificial Sequence
  Peptide Derived from Human Papillomavirus
SGTCPEDVVNK

SEQ ID NO: 45149 - protein, 9 aa, Artificial Sequence
  Peptide Derived from Human Papillomavirus
SSFALWPVY

SEQ ID NO: 45150 - protein, 11 aa, Artificial Sequence
  Peptide Derived from Human Papillomavirus
SSQSVATPSAH

SEQ ID NO: 45151 - protein, 9 aa, Artificial Sequence
  Peptide Derived from Human Papillomavirus
SSTPIPGFR

SEQ ID NO: 45152 - protein, 10 aa, Artificial Sequence
  Peptide Derived from Human Papillomavirus
SSTPIPGFRR

SEQ ID NO: 45153 - protein, 10 aa, Artificial Sequence
  Peptide Derived from Human Papillomavirus
SSTVHVSSTH

SEQ ID NO: 45154 - protein, 10 aa, Artificial Sequence
  Peptide Derived from Human Papillomavirus
STIVDVTPAR

SEQ ID NO: 45155 - protein, 8 aa, Artificial Sequence
  Peptide Derived from Human Papillomavirus
STPIPGFR

SEQ ID NO: 45156 - protein, 9 aa, Artificial Sequence
  Peptide Derived from Human Papillomavirus
STPIPGFRR

SEQ ID NO: 45157 - protein, 8 aa, Artificial Sequence
  Peptide Derived from Human Papillomavirus
STPTSGIH

SEQ ID NO: 45158 - protein, 10 aa, Artificial Sequence
  Peptide Derived from Human Papillomavirus
STPTSGIHSY

SEQ ID NO: 45159 - protein, 9 aa, Artificial Sequence
  Peptide Derived from Human Papillomavirus
STVHVSSTH

SEQ ID NO: 45160 - protein, 11 aa, Artificial Sequence
  Peptide Derived from Human Papillomavirus
STWPFVPQSPY

SEQ ID NO: 45161 - protein, 8 aa, Artificial Sequence
  Peptide Derived from Human Papillomavirus
SVATPSAH

SEQ ID NO: 45162 - protein, 9 aa, Artificial Sequence
  Peptide Derived from Human Papillomavirus
TCPEDVVNK

SEQ ID NO: 45163 - protein, 8 aa, Artificial Sequence
  Peptide Derived from Human Papillomavirus
TDPAFLDR

SEQ ID NO: 45164 - protein, 9 aa, Artificial Sequence
  Peptide Derived from Human Papillomavirus
TGSGGRAGY

SEQ ID NO: 45165 - protein, 8 aa, Artificial Sequence
  Peptide Derived from Human Papillomavirus
TGTGSGGR

SEQ ID NO: 45166 - protein, 11 aa, Artificial Sequence
  Peptide Derived from Human Papillomavirus
TGTGSGGRAGY

SEQ ID NO: 45167 - protein, 9 aa, Artificial Sequence
  Peptide Derived from Human Papillomavirus
TIVDVTPAR

SEQ ID NO: 45168 - protein, 11 aa, Artificial Sequence
  Peptide Derived from Human Papillomavirus
TSSTVHVSSTH

SEQ ID NO: 45169 - protein, 8 aa, Artificial Sequence
  Peptide Derived from Human Papillomavirus
TTRRGGVR

SEQ ID NO: 45170 - protein, 11 aa, Artificial Sequence
  Peptide Derived from Human Papillomavirus
TTRRGGVRFSR

SEQ ID NO: 45171 - protein, 8 aa, Artificial Sequence
  Peptide Derived from Human Papillomavirus
TVHVSSTH

SEQ ID NO: 45172 - protein, 8 aa, Artificial Sequence
  Peptide Derived from Human Papillomavirus
VAHRATRR

SEQ ID NO: 45173 - protein, 9 aa, Artificial Sequence
  Peptide Derived from Human Papillomavirus
VAHRATRRK

SEQ ID NO: 45174 - protein, 10 aa, Artificial Sequence
  Peptide Derived from Human Papillomavirus
VAHRATRRKR

SEQ ID NO: 45175 - protein, 11 aa, Artificial Sequence
  Peptide Derived from Human Papillomavirus
VALHRPAFTTR

SEQ ID NO: 45176 - protein, 11 aa, Artificial Sequence
  Peptide Derived from Human Papillomavirus
VATPSAHLPIK

SEQ ID NO: 45177 - protein, 9 aa, Artificial Sequence
  Peptide Derived from Human Papillomavirus
VTDPAFLDR

SEQ ID NO: 45178 - protein, 8 aa, Artificial Sequence
  Peptide Derived from Human Papillomavirus
VVNKIEQK

SEQ ID NO: 45179 - protein, 8 aa, Artificial Sequence
  Peptide Derived from Human Papillomavirus
YDVTHDVY

SEQ ID NO: 45180 - protein, 8 aa, Artificial Sequence
  Peptide Derived from Human Papillomavirus
YFFRRRRR

SEQ ID NO: 45181 - protein, 9 aa, Artificial Sequence
  Peptide Derived from Human Papillomavirus
YFFRRRRRK

SEQ ID NO: 45182 - protein, 10 aa, Artificial Sequence
  Peptide Derived from Human Papillomavirus
YFFRRRRRKR

SEQ ID NO: 45183 - protein, 8 aa, Artificial Sequence
  Peptide Derived from Human Papillomavirus
AFGLTPSI

SEQ ID NO: 45184 - protein, 11 aa, Artificial Sequence
  Peptide Derived from Human Papillomavirus
AFLKSNSQAKI

SEQ ID NO: 45185 - protein, 9 aa, Artificial Sequence
  Peptide Derived from Human Papillomavirus
AMLAKFKEL

SEQ ID NO: 45186 - protein, 9 aa, Artificial Sequence
  Peptide Derived from Human Papillomavirus
CFVNSKSHF

SEQ ID NO: 45187 - protein, 10 aa, Artificial Sequence
  Peptide Derived from Human Papillomavirus
CFVNSKSHFW

SEQ ID NO: 45188 - protein, 11 aa, Artificial Sequence
  Peptide Derived from Human Papillomavirus
CFVNSKSHFWL

SEQ ID NO: 45189 - protein, 9 aa, Artificial Sequence
  Peptide Derived from Human Papillomavirus
CMMIEPPKL

SEQ ID NO: 45190 - protein, 9 aa, Artificial Sequence
  Peptide Derived from Human Papillomavirus
CWNYIDDNL

SEQ ID NO: 45191 - protein, 10 aa, Artificial Sequence
  Peptide Derived from Human Papillomavirus
DFIVNDNDYL

SEQ ID NO: 45192 - protein, 9 aa, Artificial Sequence
  Peptide Derived from Human Papillomavirus
DWCIAAFGL

SEQ ID NO: 45193 - protein, 8 aa, Artificial Sequence
  Peptide Derived from Human Papillomavirus
DWKQIVMF

SEQ ID NO: 45194 - protein, 9 aa, Artificial Sequence
  Peptide Derived from Human Papillomavirus
DWKQIVMFL

SEQ ID NO: 45195 - protein, 9 aa, Artificial Sequence
  Peptide Derived from Human Papillomavirus
EFMSFLTAL

SEQ ID NO: 45196 - protein, 9 aa, Artificial Sequence
  Peptide Derived from Human Papillomavirus
EWIQRQTVL

SEQ ID NO: 45197 - protein, 9 aa, Artificial Sequence
  Peptide Derived from Human Papillomavirus
FFSRTWSRL

SEQ ID NO: 45198 - protein, 11 aa, Artificial Sequence
  Peptide Derived from Human Papillomavirus
FFSRTWSRLSL

SEQ ID NO: 45199 - protein, 8 aa, Artificial Sequence
  Peptide Derived from Human Papillomavirus
FMSFLTAL

SEQ ID NO: 45200 - protein, 11 aa, Artificial Sequence
  Peptide Derived from Human Papillomavirus
FMSFLTALKRF

SEQ ID NO: 45201 - protein, 11 aa, Artificial Sequence
  Peptide Derived from Human Papillomavirus
FWLQPLADAKI

SEQ ID NO: 45202 - protein, 11 aa, Artificial Sequence
  Peptide Derived from Human Papillomavirus
GMLDDATVPCW

SEQ ID NO: 45203 - protein, 8 aa, Artificial Sequence
  Peptide Derived from Human Papillomavirus
GMSLMKFL

SEQ ID NO: 45204 - protein, 10 aa, Artificial Sequence
  Peptide Derived from Human Papillomavirus
KFKELYGVSF

SEQ ID NO: 45205 - protein, 8 aa, Artificial Sequence
  Peptide Derived from Human Papillomavirus
KFLQGSVI

SEQ ID NO: 45206 - protein, 10 aa, Artificial Sequence
  Peptide Derived from Human Papillomavirus
KFLQGSVICF

SEQ ID NO: 45207 - protein, 10 aa, Artificial Sequence
  Peptide Derived from Human Papillomavirus
KYLVSPLSDI

SEQ ID NO: 45208 - protein, 9 aa, Artificial Sequence
  Peptide Derived from Human Papillomavirus
LFGMSLMKF

SEQ ID NO: 45209 - protein, 10 aa, Artificial Sequence
  Peptide Derived from Human Papillomavirus
LFGMSLMKFL

SEQ ID NO: 45210 - protein, 10 aa, Artificial Sequence
  Peptide Derived from Human Papillomavirus
LMKFLQGSVI

SEQ ID NO: 45211 - protein, 11 aa, Artificial Sequence
  Peptide Derived from Human Papillomavirus
LYGAANTGKSL

SEQ ID NO: 45212 - protein, 9 aa, Artificial Sequence
  Peptide Derived from Human Papillomavirus
LYGVSFSEL

SEQ ID NO: 45213 - protein, 8 aa, Artificial Sequence
  Peptide Derived from Human Papillomavirus
LYLHIQSL

SEQ ID NO: 45214 - protein, 8 aa, Artificial Sequence
  Peptide Derived from Human Papillomavirus
LYWYKTGI

SEQ ID NO: 45215 - protein, 11 aa, Artificial Sequence
  Peptide Derived from Human Papillomavirus
LYWYKTGISNI

SEQ ID NO: 45216 - protein, 10 aa, Artificial Sequence
  Peptide Derived from Human Papillomavirus
MFLRYQGVEF

SEQ ID NO: 45217 - protein, 8 aa, Artificial Sequence
  Peptide Derived from Human Papillomavirus
MMIEPPKL

SEQ ID NO: 45218 - protein, 10 aa, Artificial Sequence
  Peptide Derived from Human Papillomavirus
NWKSFFSRTW

SEQ ID NO: 45219 - protein, 11 aa, Artificial Sequence
  Peptide Derived from Human Papillomavirus
NYIDDNLRNAL

SEQ ID NO: 45220 - protein, 11 aa, Artificial Sequence
  Peptide Derived from Human Papillomavirus
PMCMMIEPPKL

SEQ ID NO: 45221 - protein, 10 aa, Artificial Sequence
  Peptide Derived from Human Papillomavirus
PYLHNRLVVF

SEQ ID NO: 45222 - protein, 8 aa, Artificial Sequence
  Peptide Derived from Human Papillomavirus
QMSMSQWI

SEQ ID NO: 45223 - protein, 11 aa, Artificial Sequence
  Peptide Derived from Human Papillomavirus
QMVQWAYDNDI

SEQ ID NO: 45224 - protein, 8 aa, Artificial Sequence
  Peptide Derived from Human Papillomavirus
QWAYDNDI

SEQ ID NO: 45225 - protein, 8 aa, Artificial Sequence
  Peptide Derived from Human Papillomavirus
QYCLYLHI

SEQ ID NO: 45226 - protein, 11 aa, Artificial Sequence
  Peptide Derived from Human Papillomavirus
QYCLYLHIQSL

SEQ ID NO: 45227 - protein, 9 aa, Artificial Sequence
  Peptide Derived from Human Papillomavirus
RWPYLHNRL

SEQ ID NO: 45228 - protein, 11 aa, Artificial Sequence
  Peptide Derived from Human Papillomavirus
RYKCGKNRETI

SEQ ID NO: 45229 - protein, 10 aa, Artificial Sequence
  Peptide Derived from Human Papillomavirus
RYQGVEFMSF

SEQ ID NO: 45230 - protein, 11 aa, Artificial Sequence
  Peptide Derived from Human Papillomavirus
RYQGVEFMSFL

SEQ ID NO: 45231 - protein, 10 aa, Artificial Sequence
  Peptide Derived from Human Papillomavirus
SFFSRTWSRL

SEQ ID NO: 45232 - protein, 9 aa, Artificial Sequence
  Peptide Derived from Human Papillomavirus
SFLTALKRF

SEQ ID NO: 45233 - protein, 10 aa, Artificial Sequence
  Peptide Derived from Human Papillomavirus
SFLTALKRFL

SEQ ID NO: 45234 - protein, 9 aa, Artificial Sequence
  Peptide Derived from Human Papillomavirus
SFNDCTFEL

SEQ ID NO: 45235 - protein, 9 aa, Artificial Sequence
  Peptide Derived from Human Papillomavirus
SFSELVRPF

SEQ ID NO: 45236 - protein, 9 aa, Artificial Sequence
  Peptide Derived from Human Papillomavirus
SMDVKHRPL

SEQ ID NO: 45237 - protein, 8 aa, Artificial Sequence
  Peptide Derived from Human Papillomavirus
SWGMVVLL

SEQ ID NO: 45238 - protein, 9 aa, Artificial Sequence
  Peptide Derived from Human Papillomavirus
SWGMVVLLL

SEQ ID NO: 45239 - protein, 10 aa, Artificial Sequence
  Peptide Derived from Human Papillomavirus
TFELSQMVQW

SEQ ID NO: 45240 - protein, 8 aa, Artificial Sequence
  Peptide Derived from Human Papillomavirus
TFPNEFPF

SEQ ID NO: 45241 - protein, 8 aa, Artificial Sequence
  Peptide Derived from Human Papillomavirus
VFTFPNEF

SEQ ID NO: 45242 - protein, 10 aa, Artificial Sequence
  Peptide Derived from Human Papillomavirus
VFTFPNEFPF

SEQ ID NO: 45243 - protein, 11 aa, Artificial Sequence
  Peptide Derived from Human Papillomavirus
VMFLRYQGVEF

SEQ ID NO: 45244 - protein, 9 aa, Artificial Sequence
  Peptide Derived from Human Papillomavirus
VYELNDKNW

SEQ ID NO: 45245 - protein, 8 aa, Artificial Sequence
  Peptide Derived from Human Papillomavirus
VYGDTPEW

SEQ ID NO: 45246 - protein, 9 aa, Artificial Sequence
  Peptide Derived from Human Papillomavirus
VYGDTPEWI

SEQ ID NO: 45247 - protein, 9 aa, Artificial Sequence
  Peptide Derived from Human Papillomavirus
WYKTGISNI

SEQ ID NO: 45248 - protein, 10 aa, Artificial Sequence
  Peptide Derived from Human Papillomavirus
YWYKTGISNI

SEQ ID NO: 45249 - protein, 10 aa, Artificial Sequence
  Peptide Derived from Human Papillomavirus
AFNSSHKGRI

SEQ ID NO: 45250 - protein, 8 aa, Artificial Sequence
  Peptide Derived from Human Papillomavirus
DYWKHMRL

SEQ ID NO: 45251 - protein, 8 aa, Artificial Sequence
  Peptide Derived from Human Papillomavirus
EWQRDQFL

SEQ ID NO: 45252 - protein, 8 aa, Artificial Sequence
  Peptide Derived from Human Papillomavirus
GYTVEVQF

SEQ ID NO: 45253 - protein, 8 aa, Artificial Sequence
  Peptide Derived from Human Papillomavirus
HMRLECAI

SEQ ID NO: 45254 - protein, 9 aa, Artificial Sequence
  Peptide Derived from Human Papillomavirus
HYENDSTDL

SEQ ID NO: 45255 - protein, 8 aa, Artificial Sequence
  Peptide Derived from Human Papillomavirus
HYTNWTHI

SEQ ID NO: 45256 - protein, 10 aa, Artificial Sequence
  Peptide Derived from Human Papillomavirus
HYTNWTHIYI

SEQ ID NO: 45257 - protein, 11 aa, Artificial Sequence
  Peptide Derived from Human Papillomavirus
IYNSQYSNEKW

SEQ ID NO: 45258 - protein, 10 aa, Artificial Sequence
  Peptide Derived from Human Papillomavirus
IYYKAREMGF

SEQ ID NO: 45259 - protein, 9 aa, Artificial Sequence
  Peptide Derived from Human Papillomavirus
KWTLQDVSL

SEQ ID NO: 45260 - protein, 8 aa, Artificial Sequence
  Peptide Derived from Human Papillomavirus
KYSKNKVW

SEQ ID NO: 45261 - protein, 9 aa, Artificial Sequence
  Peptide Derived from Human Papillomavirus
LYTAVSSTW

SEQ ID NO: 45262 - protein, 11 aa, Artificial Sequence
  Peptide Derived from Human Papillomavirus
LYTAVSSTWHW

SEQ ID NO: 45263 - protein, 8 aa, Artificial Sequence
  Peptide Derived from Human Papillomavirus
LYYVHEGI

SEQ ID NO: 45264 - protein, 8 aa, Artificial Sequence
  Peptide Derived from Human Papillomavirus
QFLSQVKI

SEQ ID NO: 45265 - protein, 9 aa, Artificial Sequence
  Peptide Derived from Human Papillomavirus
QYSNEKWTL

SEQ ID NO: 45266 - protein, 8 aa, Artificial Sequence
  Peptide Derived from Human Papillomavirus
RFKKHCTL

SEQ ID NO: 45267 - protein, 10 aa, Artificial Sequence
  Peptide Derived from Human Papillomavirus
RYRFKKHCTL

SEQ ID NO: 45268 - protein, 10 aa, Artificial Sequence
  Peptide Derived from Human Papillomavirus
TMHYTNWTHI

SEQ ID NO: 45269 - protein, 11 aa, Artificial Sequence
  Peptide Derived from Human Papillomavirus
TYDSEWQRDQF

SEQ ID NO: 45270 - protein, 11 aa, Artificial Sequence
  Peptide Derived from Human Papillomavirus
VWEVHAGGQVI

SEQ ID NO: 45271 - protein, 10 aa, Artificial Sequence
  Peptide Derived from Human Papillomavirus
VYLTAPTGCI

SEQ ID NO: 45272 - protein, 11 aa, Artificial Sequence
  Peptide Derived from Human Papillomavirus
YWKHMRLECAI

SEQ ID NO: 45273 - protein, 11 aa, Artificial Sequence
  Peptide Derived from Human Papillomavirus
YYGLYYVHEGI

SEQ ID NO: 45274 - protein, 9 aa, Artificial Sequence
  Peptide Derived from Human Papillomavirus
YYKAREMGF

SEQ ID NO: 45275 - protein, 11 aa, Artificial Sequence
  Peptide Derived from Human Papillomavirus
YYVHEGIRTYF

SEQ ID NO: 45276 - protein, 9 aa, Artificial Sequence
  Peptide Derived from Human Papillomavirus
AFRCFIVYI

SEQ ID NO: 45277 - protein, 10 aa, Artificial Sequence
  Peptide Derived from Human Papillomavirus
AFRCFIVYII

SEQ ID NO: 45278 - protein, 11 aa, Artificial Sequence
  Peptide Derived from Human Papillomavirus
AFRCFIVYIIF

SEQ ID NO: 45279 - protein, 10 aa, Artificial Sequence
  Peptide Derived from Human Papillomavirus
CFCVLLCVCL

SEQ ID NO: 45280 - protein, 11 aa, Artificial Sequence
  Peptide Derived from Human Papillomavirus
CFCVLLCVCLL

SEQ ID NO: 45281 - protein, 8 aa, Artificial Sequence
  Peptide Derived from Human Papillomavirus
CFIVYIIF

SEQ ID NO: 45282 - protein, 11 aa, Artificial Sequence
  Peptide Derived from Human Papillomavirus
CFIVYIIFVYI

SEQ ID NO: 45283 - protein, 9 aa, Artificial Sequence
  Peptide Derived from Human Papillomavirus
CFLLCFCVL

SEQ ID NO: 45284 - protein, 10 aa, Artificial Sequence
  Peptide Derived from Human Papillomavirus
CFLLCFCVLL

SEQ ID NO: 45285 - protein, 8 aa, Artificial Sequence
  Peptide Derived from Human Papillomavirus
IFVYIPLF

SEQ ID NO: 45286 - protein, 9 aa, Artificial Sequence
  Peptide Derived from Human Papillomavirus
IFVYIPLFL

SEQ ID NO: 45287 - protein, 10 aa, Artificial Sequence
  Peptide Derived from Human Papillomavirus
IFVYIPLFLI

SEQ ID NO: 45288 - protein, 10 aa, Artificial Sequence
  Peptide Derived from Human Papillomavirus
LFLIHTHARF

SEQ ID NO: 45289 - protein, 11 aa, Artificial Sequence
  Peptide Derived from Human Papillomavirus
LFLIHTHARFL

SEQ ID NO: 45290 - protein, 9 aa, Artificial Sequence
  Peptide Derived from Human Papillomavirus
LWITAASAF

SEQ ID NO: 45291 - protein, 8 aa, Artificial Sequence
  Peptide Derived from Human Papillomavirus
TYTSLIIL

SEQ ID NO: 45292 - protein, 10 aa, Artificial Sequence
  Peptide Derived from Human Papillomavirus
TYTSLIILVL

SEQ ID NO: 45293 - protein, 11 aa, Artificial Sequence
  Peptide Derived from Human Papillomavirus
TYTSLIILVLL

SEQ ID NO: 45294 - protein, 8 aa, Artificial Sequence
  Peptide Derived from Human Papillomavirus
VYIIFVYI

SEQ ID NO: 45295 - protein, 10 aa, Artificial Sequence
  Peptide Derived from Human Papillomavirus
VYIIFVYIPL

SEQ ID NO: 45296 - protein, 11 aa, Artificial Sequence
  Peptide Derived from Human Papillomavirus
VYIIFVYIPLF

SEQ ID NO: 45297 - protein, 8 aa, Artificial Sequence
  Peptide Derived from Human Papillomavirus
VYIPLFLI

SEQ ID NO: 45298 - protein, 9 aa, Artificial Sequence
  Peptide Derived from Human Papillomavirus
CYSLYGTTL

SEQ ID NO: 45299 - protein, 9 aa, Artificial Sequence
  Peptide Derived from Human Papillomavirus
DFAFRDLCI

SEQ ID NO: 45300 - protein, 9 aa, Artificial Sequence
  Peptide Derived from Human Papillomavirus
EYRHYCYSL

SEQ ID NO: 45301 - protein, 11 aa, Artificial Sequence
  Peptide Derived from Human Papillomavirus
HYCYSLYGTTL

SEQ ID NO: 45302 - protein, 9 aa, Artificial Sequence
  Peptide Derived from Human Papillomavirus
PYAVCDKCL

SEQ ID NO: 45303 - protein, 11 aa, Artificial Sequence
  Peptide Derived from Human Papillomavirus
PYAVCDKCLKF

SEQ ID NO: 45304 - protein, 9 aa, Artificial Sequence
  Peptide Derived from Human Papillomavirus
QYNKPLCDL

SEQ ID NO: 45305 - protein, 10 aa, Artificial Sequence
  Peptide Derived from Human Papillomavirus
QYNKPLCDLL

SEQ ID NO: 45306 - protein, 11 aa, Artificial Sequence
  Peptide Derived from Human Papillomavirus
QYNKPLCDLLI

SEQ ID NO: 45307 - protein, 9 aa, Artificial Sequence
  Peptide Derived from Human Papillomavirus
RFHNIRGRW

SEQ ID NO: 45308 - protein, 8 aa, Artificial Sequence
  Peptide Derived from Human Papillomavirus
VYCKQQLL

SEQ ID NO: 45309 - protein, 9 aa, Artificial Sequence
  Peptide Derived from Human Papillomavirus
VYDFAFRDL

SEQ ID NO: 45310 - protein, 11 aa, Artificial Sequence
  Peptide Derived from Human Papillomavirus
VYDFAFRDLCI

SEQ ID NO: 45311 - protein, 11 aa, Artificial Sequence
  Peptide Derived from Human Papillomavirus
LMGTLGIVCPI

SEQ ID NO: 45312 - protein, 10 aa, Artificial Sequence
  Peptide Derived from Human Papillomavirus
TFCCKCDSTL

SEQ ID NO: 45313 - protein, 11 aa, Artificial Sequence
  Peptide Derived from Human Papillomavirus
CYENDVNVYHI

SEQ ID NO: 45314 - protein, 9 aa, Artificial Sequence
  Peptide Derived from Human Papillomavirus
DYKQTQLCL

SEQ ID NO: 45315 - protein, 10 aa, Artificial Sequence
  Peptide Derived from Human Papillomavirus
DYKQTQLCLI

SEQ ID NO: 45316 - protein, 8 aa, Artificial Sequence
  Peptide Derived from Human Papillomavirus
EYDLQFIF

SEQ ID NO: 45317 - protein, 10 aa, Artificial Sequence
  Peptide Derived from Human Papillomavirus
EYDLQFIFQL

SEQ ID NO: 45318 - protein, 11 aa, Artificial Sequence
  Peptide Derived from Human Papillomavirus
EYLRHGEEYDL

SEQ ID NO: 45319 - protein, 8 aa, Artificial Sequence
  Peptide Derived from Human Papillomavirus
EYVARTNI

SEQ ID NO: 45320 - protein, 8 aa, Artificial Sequence
  Peptide Derived from Human Papillomavirus
FFQMSLWL

SEQ ID NO: 45321 - protein, 10 aa, Artificial Sequence
  Peptide Derived from Human Papillomavirus
FFYLRREQMF

SEQ ID NO: 45322 - protein, 10 aa, Artificial Sequence
  Peptide Derived from Human Papillomavirus
FWEVNLKEKF

SEQ ID NO: 45323 - protein, 9 aa, Artificial Sequence
  Peptide Derived from Human Papillomavirus
FYLRREQMF

SEQ ID NO: 45324 - protein, 9 aa, Artificial Sequence
  Peptide Derived from Human Papillomavirus
FYNPDTQRL

SEQ ID NO: 45325 - protein, 11 aa, Artificial Sequence
  Peptide Derived from Human Papillomavirus
FYNPDTQRLVW

SEQ ID NO: 45326 - protein, 10 aa, Artificial Sequence
  Peptide Derived from Human Papillomavirus
GFGAMDFTTL

SEQ ID NO: 45327 - protein, 8 aa, Artificial Sequence
  Peptide Derived from Human Papillomavirus
IFFQMSLW

SEQ ID NO: 45328 - protein, 9 aa, Artificial Sequence
  Peptide Derived from Human Papillomavirus
IFFQMSLWL

SEQ ID NO: 45329 - protein, 8 aa, Artificial Sequence
  Peptide Derived from Human Papillomavirus
IFNKPYWL

SEQ ID NO: 45330 - protein, 9 aa, Artificial Sequence
  Peptide Derived from Human Papillomavirus
IFQLCKITL

SEQ ID NO: 45331 - protein, 10 aa, Artificial Sequence
  Peptide Derived from Human Papillomavirus
IYYHAGTSRL

SEQ ID NO: 45332 - protein, 11 aa, Artificial Sequence
  Peptide Derived from Human Papillomavirus
IYYHAGTSRLL

SEQ ID NO: 45333 - protein, 9 aa, Artificial Sequence
  Peptide Derived from Human Papillomavirus
KFGFPDTSF

SEQ ID NO: 45334 - protein, 8 aa, Artificial Sequence
  Peptide Derived from Human Papillomavirus
KFLLQAGL

SEQ ID NO: 45335 - protein, 9 aa, Artificial Sequence
  Peptide Derived from Human Papillomavirus
KFSADLDQF

SEQ ID NO: 45336 - protein, 11 aa, Artificial Sequence
  Peptide Derived from Human Papillomavirus
KFSADLDQFPL

SEQ ID NO: 45337 - protein, 11 aa, Artificial Sequence
  Peptide Derived from Human Papillomavirus
KMVSEPYGDSL

SEQ ID NO: 45338 - protein, 9 aa, Artificial Sequence
  Peptide Derived from Human Papillomavirus
KYTFWEVNL

SEQ ID NO: 45339 - protein, 11 aa, Artificial Sequence
  Peptide Derived from Human Papillomavirus
LFFYLRREQMF

SEQ ID NO: 45340 - protein, 11 aa, Artificial Sequence
  Peptide Derived from Human Papillomavirus
LWLPSEATVYL

SEQ ID NO: 45341 - protein, 8 aa, Artificial Sequence
  Peptide Derived from Human Papillomavirus
NMSLCAAI

SEQ ID NO: 45342 - protein, 8 aa, Artificial Sequence
  Peptide Derived from Human Papillomavirus
PYGDSLFF

SEQ ID NO: 45343 - protein, 10 aa, Artificial Sequence
  Peptide Derived from Human Papillomavirus
PYGDSLFFYL

SEQ ID NO: 45344 - protein, 9 aa, Artificial Sequence
  Peptide Derived from Human Papillomavirus
QFIFQLCKI

SEQ ID NO: 45345 - protein, 11 aa, Artificial Sequence
  Peptide Derived from Human Papillomavirus
QFIFQLCKITL

SEQ ID NO: 45346 - protein, 8 aa, Artificial Sequence
  Peptide Derived from Human Papillomavirus
QFPLGRKF

SEQ ID NO: 45347 - protein, 9 aa, Artificial Sequence
  Peptide Derived from Human Papillomavirus
QFPLGRKFL

SEQ ID NO: 45348 - protein, 10 aa, Artificial Sequence
  Peptide Derived from Human Papillomavirus
QFPLGRKFLL

SEQ ID NO: 45349 - protein, 8 aa, Artificial Sequence
  Peptide Derived from Human Papillomavirus
QMFVRHLF

SEQ ID NO: 45350 - protein, 9 aa, Artificial Sequence
  Peptide Derived from Human Papillomavirus
QYRVFRIHL

SEQ ID NO: 45351 - protein, 8 aa, Artificial Sequence
  Peptide Derived from Human Papillomavirus
RFVTSQAI

SEQ ID NO: 45352 - protein, 10 aa, Artificial Sequence
  Peptide Derived from Human Papillomavirus
SFYNPDTQRL

SEQ ID NO: 45353 - protein, 9 aa, Artificial Sequence
  Peptide Derived from Human Papillomavirus
SMDYKQTQL

SEQ ID NO: 45354 - protein, 11 aa, Artificial Sequence
  Peptide Derived from Human Papillomavirus
SMDYKQTQLCL

SEQ ID NO: 45355 - protein, 10 aa, Artificial Sequence
  Peptide Derived from Human Papillomavirus
SMNSTILEDW

SEQ ID NO: 45356 - protein, 9 aa, Artificial Sequence
  Peptide Derived from Human Papillomavirus
SMVTSDAQI

SEQ ID NO: 45357 - protein, 10 aa, Artificial Sequence
  Peptide Derived from Human Papillomavirus
SMVTSDAQIF

SEQ ID NO: 45358 - protein, 8 aa, Artificial Sequence
  Peptide Derived from Human Papillomavirus
TFIYILVI

SEQ ID NO: 45359 - protein, 11 aa, Artificial Sequence
  Peptide Derived from Human Papillomavirus
TFWEVNLKEKF

SEQ ID NO: 45360 - protein, 10 aa, Artificial Sequence
  Peptide Derived from Human Papillomavirus
TYIHSMNSTI

SEQ ID NO: 45361 - protein, 11 aa, Artificial Sequence
  Peptide Derived from Human Papillomavirus
TYIHSMNSTIL

SEQ ID NO: 45362 - protein, 11 aa, Artificial Sequence
  Peptide Derived from Human Papillomavirus
TYKNTNFKEYL

SEQ ID NO: 45363 - protein, 10 aa, Artificial Sequence
  Peptide Derived from Human Papillomavirus
TYRFVTSQAI

SEQ ID NO: 45364 - protein, 10 aa, Artificial Sequence
  Peptide Derived from Human Papillomavirus
VYHIFFQMSL

SEQ ID NO: 45365 - protein, 11 aa, Artificial Sequence
  Peptide Derived from Human Papillomavirus
VYHIFFQMSLW

SEQ ID NO: 45366 - protein, 9 aa, Artificial Sequence
  Peptide Derived from Human Papillomavirus
YYHAGTSRL

SEQ ID NO: 45367 - protein, 10 aa, Artificial Sequence
  Peptide Derived from Human Papillomavirus
YYHAGTSRLL

SEQ ID NO: 45368 - protein, 9 aa, Artificial Sequence
  Peptide Derived from Human Papillomavirus
AFITTPTKL

SEQ ID NO: 45369 - protein, 10 aa, Artificial Sequence
  Peptide Derived from Human Papillomavirus
AFITTPTKLI

SEQ ID NO: 45370 - protein, 11 aa, Artificial Sequence
  Peptide Derived from Human Papillomavirus
AYEGIDVDNTL

SEQ ID NO: 45371 - protein, 8 aa, Artificial Sequence
  Peptide Derived from Human Papillomavirus
DFLDIVAL

SEQ ID NO: 45372 - protein, 11 aa, Artificial Sequence
  Peptide Derived from Human Papillomavirus
DFSTIDSAEEI

SEQ ID NO: 45373 - protein, 11 aa, Artificial Sequence
  Peptide Derived from Human Papillomavirus
DFYLHPSYYML

SEQ ID NO: 45374 - protein, 10 aa, Artificial Sequence
  Peptide Derived from Human Papillomavirus
FYLHPSYYML

SEQ ID NO: 45375 - protein, 9 aa, Artificial Sequence
  Peptide Derived from Human Papillomavirus
GYIPANTTI

SEQ ID NO: 45376 - protein, 11 aa, Artificial Sequence
  Peptide Derived from Human Papillomavirus
GYIPANTTIPF

SEQ ID NO: 45377 - protein, 9 aa, Artificial Sequence
  Peptide Derived from Human Papillomavirus
HFTLSSSTI

SEQ ID NO: 45378 - protein, 9 aa, Artificial Sequence
  Peptide Derived from Human Papillomavirus
HYYYDFSTI

SEQ ID NO: 45379 - protein, 9 aa, Artificial Sequence
  Peptide Derived from Human Papillomavirus
LYDIYADDF

SEQ ID NO: 45380 - protein, 10 aa, Artificial Sequence
  Peptide Derived from Human Papillomavirus
LYDIYADDFI

SEQ ID NO: 45381 - protein, 10 aa, Artificial Sequence
  Peptide Derived from Human Papillomavirus
LYFSSNDNSI

SEQ ID NO: 45382 - protein, 10 aa, Artificial Sequence
  Peptide Derived from Human Papillomavirus
NYEEIPMDTF

SEQ ID NO: 45383 - protein, 11 aa, Artificial Sequence
  Peptide Derived from Human Papillomavirus
NYEEIPMDTFI

SEQ ID NO: 45384 - protein, 8 aa, Artificial Sequence
  Peptide Derived from Human Papillomavirus
PFGGAYNI

SEQ ID NO: 45385 - protein, 10 aa, Artificial Sequence
  Peptide Derived from Human Papillomavirus
PFGGAYNIPL

SEQ ID NO: 45386 - protein, 9 aa, Artificial Sequence
  Peptide Derived from Human Papillomavirus
PYFFSDVSL

SEQ ID NO: 45387 - protein, 8 aa, Artificial Sequence
  Peptide Derived from Human Papillomavirus
QYGSMGVF

SEQ ID NO: 45388 - protein, 9 aa, Artificial Sequence
  Peptide Derived from Human Papillomavirus
QYGSMGVFF

SEQ ID NO: 45389 - protein, 11 aa, Artificial Sequence
  Peptide Derived from Human Papillomavirus
QYTIIADAGDF

SEQ ID NO: 45390 - protein, 11 aa, Artificial Sequence
  Peptide Derived from Human Papillomavirus
RYSRIGNKQTL

SEQ ID NO: 45391 - protein, 9 aa, Artificial Sequence
  Peptide Derived from Human Papillomavirus
SMGVFFGGL

SEQ ID NO: 45392 - protein, 11 aa, Artificial Sequence
  Peptide Derived from Human Papillomavirus
SMGVFFGGLGI

SEQ ID NO: 45393 - protein, 8 aa, Artificial Sequence
  Peptide Derived from Human Papillomavirus
TFTDPSVL

SEQ ID NO: 45394 - protein, 10 aa, Artificial Sequence
  Peptide Derived from Human Papillomavirus
TYDNPAYEGI

SEQ ID NO: 45395 - protein, 10 aa, Artificial Sequence
  Peptide Derived from Human Papillomavirus
TYTTTSHAAL

SEQ ID NO: 45396 - protein, 8 aa, Artificial Sequence
  Peptide Derived from Human Papillomavirus
VFFGGLGI

SEQ ID NO: 45397 - protein, 8 aa, Artificial Sequence
  Peptide Derived from Human Papillomavirus
YFFSDVSL

SEQ ID NO: 45398 - protein, 9 aa, Artificial Sequence
  Peptide Derived from Human Papillomavirus
YFSSNDNSI

SEQ ID NO: 45399 - protein, 11 aa, Artificial Sequence
  Peptide Derived from Human Papillomavirus
YFSSNDNSINI

SEQ ID NO: 45400 - protein, 10 aa, Artificial Sequence
  Peptide Derived from Human Papillomavirus
YMLRKRRKRL

SEQ ID NO: 45401 - protein, 11 aa, Artificial Sequence
  Peptide Derived from Human Papillomavirus
YYMLRKRRKRL

SEQ ID NO: 45402 - protein, 8 aa, Artificial Sequence
  Peptide Derived from Human Papillomavirus
YYYDFSTI

SEQ ID NO: 45403 - protein, 11 aa, Artificial Sequence
  Peptide Derived from Human Papillomavirus
AMLDDATTTCW

SEQ ID NO: 45404 - protein, 10 aa, Artificial Sequence
  Peptide Derived from Human Papillomavirus
CFFERTWSRL

SEQ ID NO: 45405 - protein, 9 aa, Artificial Sequence
  Peptide Derived from Human Papillomavirus
CMLIQPPKL

SEQ ID NO: 45406 - protein, 9 aa, Artificial Sequence
  Peptide Derived from Human Papillomavirus
DFIDTQGTF

SEQ ID NO: 45407 - protein, 8 aa, Artificial Sequence
  Peptide Derived from Human Papillomavirus
DMAFEYAL

SEQ ID NO: 45408 - protein, 9 aa, Artificial Sequence
  Peptide Derived from Human Papillomavirus
DMAFEYALL

SEQ ID NO: 45409 - protein, 8 aa, Artificial Sequence
  Peptide Derived from Human Papillomavirus
DWRPIVQF

SEQ ID NO: 45410 - protein, 9 aa, Artificial Sequence
  Peptide Derived from Human Papillomavirus
DWRPIVQFL

SEQ ID NO: 45411 - protein, 9 aa, Artificial Sequence
  Peptide Derived from Human Papillomavirus
EFITFLGAL

SEQ ID NO: 45412 - protein, 8 aa, Artificial Sequence
  Peptide Derived from Human Papillomavirus
EFPNAFPF

SEQ ID NO: 45413 - protein, 11 aa, Artificial Sequence
  Peptide Derived from Human Papillomavirus
EMVQWAFDNEL

SEQ ID NO: 45414 - protein, 8 aa, Artificial Sequence
  Peptide Derived from Human Papillomavirus
EWIQRLTI

SEQ ID NO: 45415 - protein, 9 aa, Artificial Sequence
  Peptide Derived from Human Papillomavirus
EWIQRLTII

SEQ ID NO: 45416 - protein, 9 aa, Artificial Sequence
  Peptide Derived from Human Papillomavirus
FFERTWSRL

SEQ ID NO: 45417 - protein, 11 aa, Artificial Sequence
  Peptide Derived from Human Papillomavirus
FFERTWSRLDL

SEQ ID NO: 45418 - protein, 9 aa, Artificial Sequence
  Peptide Derived from Human Papillomavirus
GFKTLIQPF

SEQ ID NO: 45419 - protein, 10 aa, Artificial Sequence
  Peptide Derived from Human Papillomavirus
GFKTLIQPFI

SEQ ID NO: 45420 - protein, 11 aa, Artificial Sequence
  Peptide Derived from Human Papillomavirus
GFKTLIQPFIL

SEQ ID NO: 45421 - protein, 8 aa, Artificial Sequence
  Peptide Derived from Human Papillomavirus
GMSFIHFI

SEQ ID NO: 45422 - protein, 8 aa, Artificial Sequence
  Peptide Derived from Human Papillomavirus
GWFYVQAI

SEQ ID NO: 45423 - protein, 8 aa, Artificial Sequence
  Peptide Derived from Human Papillomavirus
HFIQGAVI

SEQ ID NO: 45424 - protein, 10 aa, Artificial Sequence
  Peptide Derived from Human Papillomavirus
HFIQGAVISF

SEQ ID NO: 45425 - protein, 8 aa, Artificial Sequence
  Peptide Derived from Human Papillomavirus
IFGVNPTI

SEQ ID NO: 45426 - protein, 9 aa, Artificial Sequence
  Peptide Derived from Human Papillomavirus
KWGVLILAL

SEQ ID NO: 45427 - protein, 10 aa, Artificial Sequence
  Peptide Derived from Human Papillomavirus
KWGVLILALL

SEQ ID NO: 45428 - protein, 8 aa, Artificial Sequence
  Peptide Derived from Human Papillomavirus
LYAHIQCL

SEQ ID NO: 45429 - protein, 8 aa, Artificial Sequence
  Peptide Derived from Human Papillomavirus
LYWYRTGI

SEQ ID NO: 45430 - protein, 11 aa, Artificial Sequence
  Peptide Derived from Human Papillomavirus
LYWYRTGISNI

SEQ ID NO: 45431 - protein, 10 aa, Artificial Sequence
  Peptide Derived from Human Papillomavirus
NFDLSEMVQW

SEQ ID NO: 45432 - protein, 8 aa, Artificial Sequence
  Peptide Derived from Human Papillomavirus
NMSQWIRF

SEQ ID NO: 45433 - protein, 10 aa, Artificial Sequence
  Peptide Derived from Human Papillomavirus
NWKCFFERTW

SEQ ID NO: 45434 - protein, 8 aa, Artificial Sequence
  Peptide Derived from Human Papillomavirus
PFILYAHI

SEQ ID NO: 45435 - protein, 11 aa, Artificial Sequence
  Peptide Derived from Human Papillomavirus
PFILYAHIQCL

SEQ ID NO: 45436 - protein, 10 aa, Artificial Sequence
  Peptide Derived from Human Papillomavirus
PYLESRITVF

SEQ ID NO: 45437 - protein, 8 aa, Artificial Sequence
  Peptide Derived from Human Papillomavirus
QFLRYQQI

SEQ ID NO: 45438 - protein, 10 aa, Artificial Sequence
  Peptide Derived from Human Papillomavirus
QFLRYQQIEF

SEQ ID NO: 45439 - protein, 11 aa, Artificial Sequence
  Peptide Derived from Human Papillomavirus
QFLRYQQIEFI

SEQ ID NO: 45440 - protein, 8 aa, Artificial Sequence
  Peptide Derived from Human Papillomavirus
QMNMSQWI

SEQ ID NO: 45441 - protein, 10 aa, Artificial Sequence
  Peptide Derived from Human Papillomavirus
QMNMSQWIRF

SEQ ID NO: 45442 - protein, 8 aa, Artificial Sequence
  Peptide Derived from Human Papillomavirus
QWAFDNEL

SEQ ID NO: 45443 - protein, 10 aa, Artificial Sequence
  Peptide Derived from Human Papillomavirus
QWIRFRCSKI

SEQ ID NO: 45444 - protein, 9 aa, Artificial Sequence
  Peptide Derived from Human Papillomavirus
RWPYLESRI

SEQ ID NO: 45445 - protein, 9 aa, Artificial Sequence
  Peptide Derived from Human Papillomavirus
RYKCGKSRL

SEQ ID NO: 45446 - protein, 8 aa, Artificial Sequence
  Peptide Derived from Human Papillomavirus
RYQQIEFI

SEQ ID NO: 45447 - protein, 10 aa, Artificial Sequence
  Peptide Derived from Human Papillomavirus
RYQQIEFITF

SEQ ID NO: 45448 - protein, 11 aa, Artificial Sequence
  Peptide Derived from Human Papillomavirus
RYQQIEFITFL

SEQ ID NO: 45449 - protein, 11 aa, Artificial Sequence
  Peptide Derived from Human Papillomavirus
SFIHFIQGAVI

SEQ ID NO: 45450 - protein, 9 aa, Artificial Sequence
  Peptide Derived from Human Papillomavirus
SFTDLVRNF

SEQ ID NO: 45451 - protein, 9 aa, Artificial Sequence
  Peptide Derived from Human Papillomavirus
SFVNSTSHF

SEQ ID NO: 45452 - protein, 10 aa, Artificial Sequence
  Peptide Derived from Human Papillomavirus
SFVNSTSHFW

SEQ ID NO: 45453 - protein, 11 aa, Artificial Sequence
  Peptide Derived from Human Papillomavirus
SFVNSTSHFWL

SEQ ID NO: 45454 - protein, 8 aa, Artificial Sequence
  Peptide Derived from Human Papillomavirus
SYFGMSFI

SEQ ID NO: 45455 - protein, 10 aa, Artificial Sequence
  Peptide Derived from Human Papillomavirus
SYFGMSFIHF

SEQ ID NO: 45456 - protein, 11 aa, Artificial Sequence
  Peptide Derived from Human Papillomavirus
SYFGMSFIHFI

SEQ ID NO: 45457 - protein, 8 aa, Artificial Sequence
  Peptide Derived from Human Papillomavirus
TFCEQAEL

SEQ ID NO: 45458 - protein, 9 aa, Artificial Sequence
  Peptide Derived from Human Papillomavirus
TFLGALKSF

SEQ ID NO: 45459 - protein, 10 aa, Artificial Sequence
  Peptide Derived from Human Papillomavirus
TFLGALKSFL

SEQ ID NO: 45460 - protein, 11 aa, Artificial Sequence
  Peptide Derived from Human Papillomavirus
TYFDTYMRNAL

SEQ ID NO: 45461 - protein, 9 aa, Artificial Sequence
  Peptide Derived from Human Papillomavirus
TYGLSFTDL

SEQ ID NO: 45462 - protein, 8 aa, Artificial Sequence
  Peptide Derived from Human Papillomavirus
VFEFPNAF

SEQ ID NO: 45463 - protein, 10 aa, Artificial Sequence
  Peptide Derived from Human Papillomavirus
VFEFPNAFPF

SEQ ID NO: 45464 - protein, 8 aa, Artificial Sequence
  Peptide Derived from Human Papillomavirus
VFKDTYGL

SEQ ID NO: 45465 - protein, 10 aa, Artificial Sequence
  Peptide Derived from Human Papillomavirus
VFKDTYGLSF

SEQ ID NO: 45466 - protein, 8 aa, Artificial Sequence
  Peptide Derived from Human Papillomavirus
VMGDTPEW

SEQ ID NO: 45467 - protein, 9 aa, Artificial Sequence
  Peptide Derived from Human Papillomavirus
VMGDTPEWI

SEQ ID NO: 45468 - protein, 9 aa, Artificial Sequence
  Peptide Derived from Human Papillomavirus
VYEINDKNW

SEQ ID NO: 45469 - protein, 9 aa, Artificial Sequence
  Peptide Derived from Human Papillomavirus
WYRTGISNI

SEQ ID NO: 45470 - protein, 10 aa, Artificial Sequence
  Peptide Derived from Human Papillomavirus
YFDTYMRNAL

SEQ ID NO: 45471 - protein, 9 aa, Artificial Sequence
  Peptide Derived from Human Papillomavirus
YFGMSFIHF

SEQ ID NO: 45472 - protein, 10 aa, Artificial Sequence
  Peptide Derived from Human Papillomavirus
YFGMSFIHFI

SEQ ID NO: 45473 - protein, 11 aa, Artificial Sequence
  Peptide Derived from Human Papillomavirus
YMRNALDGNPI

SEQ ID NO: 45474 - protein, 10 aa, Artificial Sequence
  Peptide Derived from Human Papillomavirus
YWYRTGISNI

SEQ ID NO: 45475 - protein, 11 aa, Artificial Sequence
  Peptide Derived from Human Papillomavirus
DWTLQDTCEEL

SEQ ID NO: 45476 - protein, 9 aa, Artificial Sequence
  Peptide Derived from Human Papillomavirus
FFAAREHGI

SEQ ID NO: 45477 - protein, 9 aa, Artificial Sequence
  Peptide Derived from Human Papillomavirus
GYNTFYIEF

SEQ ID NO: 45478 - protein, 9 aa, Artificial Sequence
  Peptide Derived from Human Papillomavirus
HYENDSKDI

SEQ ID NO: 45479 - protein, 9 aa, Artificial Sequence
  Peptide Derived from Human Papillomavirus
HYRDISSTW

SEQ ID NO: 45480 - protein, 11 aa, Artificial Sequence
  Peptide Derived from Human Papillomavirus
HYRDISSTWHW

SEQ ID NO: 45481 - protein, 10 aa, Artificial Sequence
  Peptide Derived from Human Papillomavirus
IFFAAREHGI

SEQ ID NO: 45482 - protein, 8 aa, Artificial Sequence
  Peptide Derived from Human Papillomavirus
KFLNTVAI

SEQ ID NO: 45483 - protein, 8 aa, Artificial Sequence
  Peptide Derived from Human Papillomavirus
KYGNTGTW

SEQ ID NO: 45484 - protein, 10 aa, Artificial Sequence
  Peptide Derived from Human Papillomavirus
LWNTEPTHCF

SEQ ID NO: 45485 - protein, 11 aa, Artificial Sequence
  Peptide Derived from Human Papillomavirus
LYYVKEGYNTF

SEQ ID NO: 45486 - protein, 8 aa, Artificial Sequence
  Peptide Derived from Human Papillomavirus
QYWQLIRW

SEQ ID NO: 45487 - protein, 8 aa, Artificial Sequence
  Peptide Derived from Human Papillomavirus
RWENAIFF

SEQ ID NO: 45488 - protein, 9 aa, Artificial Sequence
  Peptide Derived from Human Papillomavirus
RYKTEDWTL

SEQ ID NO: 45489 - protein, 11 aa, Artificial Sequence
  Peptide Derived from Human Papillomavirus
TWEVHFGNNVI

SEQ ID NO: 45490 - protein, 11 aa, Artificial Sequence
  Peptide Derived from Human Papillomavirus
TYHSETQRTKF

SEQ ID NO: 45491 - protein, 10 aa, Artificial Sequence
  Peptide Derived from Human Papillomavirus
VYYMTDAGTW

SEQ ID NO: 45492 - protein, 8 aa, Artificial Sequence
  Peptide Derived from Human Papillomavirus
YMTDAGTW

SEQ ID NO: 45493 - protein, 11 aa, Artificial Sequence
  Peptide Derived from Human Papillomavirus
YWQLIRWENAI

SEQ ID NO: 45494 - protein, 9 aa, Artificial Sequence
  Peptide Derived from Human Papillomavirus
YYMTDAGTW

SEQ ID NO: 45495 - protein, 10 aa, Artificial Sequence
  Peptide Derived from Human Papillomavirus
YYVKEGYNTF

SEQ ID NO: 45496 - protein, 9 aa, Artificial Sequence
  Peptide Derived from Human Papillomavirus
AFTVYVFCF

SEQ ID NO: 45497 - protein, 10 aa, Artificial Sequence
  Peptide Derived from Human Papillomavirus
AFTVYVFCFL

SEQ ID NO: 45498 - protein, 11 aa, Artificial Sequence
  Peptide Derived from Human Papillomavirus
AFTVYVFCFLL

SEQ ID NO: 45499 - protein, 9 aa, Artificial Sequence
  Peptide Derived from Human Papillomavirus
AWVLVFVYI

SEQ ID NO: 45500 - protein, 8 aa, Artificial Sequence
  Peptide Derived from Human Papillomavirus
AYAWVLVF

SEQ ID NO: 45501 - protein, 11 aa, Artificial Sequence
  Peptide Derived from Human Papillomavirus
AYAWVLVFVYI

SEQ ID NO: 45502 - protein, 8 aa, Artificial Sequence
  Peptide Derived from Human Papillomavirus
CFLLPMLL

SEQ ID NO: 45503 - protein, 9 aa, Artificial Sequence
  Peptide Derived from Human Papillomavirus
CFLLPMLLL

SEQ ID NO: 45504 - protein, 11 aa, Artificial Sequence
  Peptide Derived from Human Papillomavirus
CFLLPMLLLHI

SEQ ID NO: 45505 - protein, 9 aa, Artificial Sequence
  Peptide Derived from Human Papillomavirus
CMCAYAWVL

SEQ ID NO: 45506 - protein, 11 aa, Artificial Sequence
  Peptide Derived from Human Papillomavirus
CMCAYAWVLVF

SEQ ID NO: 45507 - protein, 10 aa, Artificial Sequence
  Peptide Derived from Human Papillomavirus
CMYVCCHVPL

SEQ ID NO: 45508 - protein, 11 aa, Artificial Sequence
  Peptide Derived from Human Papillomavirus
CMYVCCHVPLL

SEQ ID NO: 45509 - protein, 9 aa, Artificial Sequence
  Peptide Derived from Human Papillomavirus
MYVCCHVPL

SEQ ID NO: 45510 - protein, 10 aa, Artificial Sequence
  Peptide Derived from Human Papillomavirus
MYVCCHVPLL

SEQ ID NO: 45511 - protein, 10 aa, Artificial Sequence
  Peptide Derived from Human Papillomavirus
PMLLLHIHAI

SEQ ID NO: 45512 - protein, 11 aa, Artificial Sequence
  Peptide Derived from Human Papillomavirus
PMLLLHIHAIL

SEQ ID NO: 45513 - protein, 9 aa, Artificial Sequence
  Peptide Derived from Human Papillomavirus
VFCFLLPML

SEQ ID NO: 45514 - protein, 10 aa, Artificial Sequence
  Peptide Derived from Human Papillomavirus
VFCFLLPMLL

SEQ ID NO: 45515 - protein, 11 aa, Artificial Sequence
  Peptide Derived from Human Papillomavirus
VFCFLLPMLLL

SEQ ID NO: 45516 - protein, 8 aa, Artificial Sequence
  Peptide Derived from Human Papillomavirus
VFVYIVVI

SEQ ID NO: 45517 - protein, 8 aa, Artificial Sequence
  Peptide Derived from Human Papillomavirus
VYVFCFLL

SEQ ID NO: 45518 - protein, 11 aa, Artificial Sequence
  Peptide Derived from Human Papillomavirus
VYVFCFLLPML

SEQ ID NO: 45519 - protein, 9 aa, Artificial Sequence
  Peptide Derived from Human Papillomavirus
DFYSRIREL

SEQ ID NO: 45520 - protein, 8 aa, Artificial Sequence
  Peptide Derived from Human Papillomavirus
EFAFKDLF

SEQ ID NO: 45521 - protein, 8 aa, Artificial Sequence
  Peptide Derived from Human Papillomavirus
FYSRIREL

SEQ ID NO: 45522 - protein, 11 aa, Artificial Sequence
  Peptide Derived from Human Papillomavirus
HYSDSVYGDTL

SEQ ID NO: 45523 - protein, 9 aa, Artificial Sequence
  Peptide Derived from Human Papillomavirus
LFVVYRDSI

SEQ ID NO: 45524 - protein, 9 aa, Artificial Sequence
  Peptide Derived from Human Papillomavirus
LYNLLIRCL

SEQ ID NO: 45525 - protein, 11 aa, Artificial Sequence
  Peptide Derived from Human Papillomavirus
PYKLPDLCTEL

SEQ ID NO: 45526 - protein, 9 aa, Artificial Sequence
  Peptide Derived from Human Papillomavirus
VFEFAFKDL

SEQ ID NO: 45527 - protein, 10 aa, Artificial Sequence
  Peptide Derived from Human Papillomavirus
VFEFAFKDLF

SEQ ID NO: 45528 - protein, 9 aa, Artificial Sequence
  Peptide Derived from Human Papillomavirus
VYCKTVLEL

SEQ ID NO: 45529 - protein, 9 aa, Artificial Sequence
  Peptide Derived from Human Papillomavirus
VYGDTLEKL

SEQ ID NO: 45530 - protein, 10 aa, Artificial Sequence
  Peptide Derived from Human Papillomavirus
AFQQLFLNTL

SEQ ID NO: 45531 - protein, 10 aa, Artificial Sequence
  Peptide Derived from Human Papillomavirus
CMCCKCEARI

SEQ ID NO: 45532 - protein, 8 aa, Artificial Sequence
  Peptide Derived from Human Papillomavirus
LFLNTLSF

SEQ ID NO: 45533 - protein, 11 aa, Artificial Sequence
  Peptide Derived from Human Papillomavirus
AYQYRVFRVQL

SEQ ID NO: 45534 - protein, 9 aa, Artificial Sequence
  Peptide Derived from Human Papillomavirus
DYKQTQLCI

SEQ ID NO: 45535 - protein, 10 aa, Artificial Sequence
  Peptide Derived from Human Papillomavirus
DYKQTQLCIL

SEQ ID NO: 45536 - protein, 8 aa, Artificial Sequence
  Peptide Derived from Human Papillomavirus
DYVTPTSI

SEQ ID NO: 45537 - protein, 9 aa, Artificial Sequence
  Peptide Derived from Human Papillomavirus
DYVTPTSIF

SEQ ID NO: 45538 - protein, 8 aa, Artificial Sequence
  Peptide Derived from Human Papillomavirus
EYDLQFIF

SEQ ID NO: 45539 - protein, 10 aa, Artificial Sequence
  Peptide Derived from Human Papillomavirus
EYDLQFIFQL

SEQ ID NO: 45540 - protein, 9 aa, Artificial Sequence
  Peptide Derived from Human Papillomavirus
FFCLRREQL

SEQ ID NO: 45541 - protein, 10 aa, Artificial Sequence
  Peptide Derived from Human Papillomavirus
FFCLRREQLF

SEQ ID NO: 45542 - protein, 10 aa, Artificial Sequence
  Peptide Derived from Human Papillomavirus
FWNVDLKEKF

SEQ ID NO: 45543 - protein, 9 aa, Artificial Sequence
  Peptide Derived from Human Papillomavirus
FYHAGSSRL

SEQ ID NO: 45544 - protein, 10 aa, Artificial Sequence
  Peptide Derived from Human Papillomavirus
FYHAGSSRLL

SEQ ID NO: 45545 - protein, 10 aa, Artificial Sequence
  Peptide Derived from Human Papillomavirus
GYGAMDFSTL

SEQ ID NO: 45546 - protein, 11 aa, Artificial Sequence
  Peptide Derived from Human Papillomavirus
HYHLLPLYGPL

SEQ ID NO: 45547 - protein, 8 aa, Artificial Sequence
  Peptide Derived from Human Papillomavirus
IFLQMALW

SEQ ID NO: 45548 - protein, 9 aa, Artificial Sequence
  Peptide Derived from Human Papillomavirus
IFQLCTITL

SEQ ID NO: 45549 - protein, 10 aa, Artificial Sequence
  Peptide Derived from Human Papillomavirus
IFYHAGSSRL

SEQ ID NO: 45550 - protein, 11 aa, Artificial Sequence
  Peptide Derived from Human Papillomavirus
IFYHAGSSRLL

SEQ ID NO: 45551 - protein, 9 aa, Artificial Sequence
  Peptide Derived from Human Papillomavirus
IYNPETQRL

SEQ ID NO: 45552 - protein, 11 aa, Artificial Sequence
  Peptide Derived from Human Papillomavirus
IYNPETQRLVW

SEQ ID NO: 45553 - protein, 9 aa, Artificial Sequence
  Peptide Derived from Human Papillomavirus
KFGLPDTSI

SEQ ID NO: 45554 - protein, 8 aa, Artificial Sequence
  Peptide Derived from Human Papillomavirus
KFLVQAGL

SEQ ID NO: 45555 - protein, 11 aa, Artificial Sequence
  Peptide Derived from Human Papillomavirus
KFSLDLDQYPL

SEQ ID NO: 45556 - protein, 11 aa, Artificial Sequence
  Peptide Derived from Human Papillomavirus
KFWNVDLKEKF

SEQ ID NO: 45557 - protein, 9 aa, Artificial Sequence
  Peptide Derived from Human Papillomavirus
LFLRNVNVF

SEQ ID NO: 45558 - protein, 11 aa, Artificial Sequence
  Peptide Derived from Human Papillomavirus
LFLRNVNVFPI

SEQ ID NO: 45559 - protein, 8 aa, Artificial Sequence
  Peptide Derived from Human Papillomavirus
LFNKPYWL

SEQ ID NO: 45560 - protein, 11 aa, Artificial Sequence
  Peptide Derived from Human Papillomavirus
LWRPSDNTVYL

SEQ ID NO: 45561 - protein, 11 aa, Artificial Sequence
  Peptide Derived from Human Papillomavirus
LYGPLYHPRPL

SEQ ID NO: 45562 - protein, 9 aa, Artificial Sequence
  Peptide Derived from Human Papillomavirus
LYHPRPLPL

SEQ ID NO: 45563 - protein, 8 aa, Artificial Sequence
  Peptide Derived from Human Papillomavirus
LYTRVLIL

SEQ ID NO: 45564 - protein, 10 aa, Artificial Sequence
  Peptide Derived from Human Papillomavirus
MFFCLRREQL

SEQ ID NO: 45565 - protein, 11 aa, Artificial Sequence
  Peptide Derived from Human Papillomavirus
MFFCLRREQLF

SEQ ID NO: 45566 - protein, 8 aa, Artificial Sequence
  Peptide Derived from Human Papillomavirus
PYDKLKFW

SEQ ID NO: 45567 - protein, 8 aa, Artificial Sequence
  Peptide Derived from Human Papillomavirus
PYGDSMFF

SEQ ID NO: 45568 - protein, 10 aa, Artificial Sequence
  Peptide Derived from Human Papillomavirus
PYGDSMFFCL

SEQ ID NO: 45569 - protein, 9 aa, Artificial Sequence
  Peptide Derived from Human Papillomavirus
QFIFQLCTI

SEQ ID NO: 45570 - protein, 11 aa, Artificial Sequence
  Peptide Derived from Human Papillomavirus
QFIFQLCTITL

SEQ ID NO: 45571 - protein, 8 aa, Artificial Sequence
  Peptide Derived from Human Papillomavirus
QYPLGRKF

SEQ ID NO: 45572 - protein, 9 aa, Artificial Sequence
  Peptide Derived from Human Papillomavirus
QYPLGRKFL

SEQ ID NO: 45573 - protein, 9 aa, Artificial Sequence
  Peptide Derived from Human Papillomavirus
QYRVFRVQL

SEQ ID NO: 45574 - protein, 11 aa, Artificial Sequence
  Peptide Derived from Human Papillomavirus
QYSRHVEEYDL

SEQ ID NO: 45575 - protein, 8 aa, Artificial Sequence
  Peptide Derived from Human Papillomavirus
RFVQSVAI

SEQ ID NO: 45576 - protein, 11 aa, Artificial Sequence
  Peptide Derived from Human Papillomavirus
SMFFCLRREQL

SEQ ID NO: 45577 - protein, 10 aa, Artificial Sequence
  Peptide Derived from Human Papillomavirus
SMNSSILEDW

SEQ ID NO: 45578 - protein, 10 aa, Artificial Sequence
  Peptide Derived from Human Papillomavirus
SYIHSMNSSI

SEQ ID NO: 45579 - protein, 11 aa, Artificial Sequence
  Peptide Derived from Human Papillomavirus
SYIHSMNSSIL

SEQ ID NO: 45580 - protein, 10 aa, Artificial Sequence
  Peptide Derived from Human Papillomavirus
TMGDTVPQSL

SEQ ID NO: 45581 - protein, 10 aa, Artificial Sequence
  Peptide Derived from Human Papillomavirus
TYRFVQSVAI

SEQ ID NO: 45582 - protein, 10 aa, Artificial Sequence
  Peptide Derived from Human Papillomavirus
VFPIFLQMAL

SEQ ID NO: 45583 - protein, 11 aa, Artificial Sequence
  Peptide Derived from Human Papillomavirus
VFPIFLQMALW

SEQ ID NO: 45584 - protein, 9 aa, Artificial Sequence
  Peptide Derived from Human Papillomavirus
VWACAGVEI

SEQ ID NO: 45585 - protein, 8 aa, Artificial Sequence
  Peptide Derived from Human Papillomavirus
VYMVHIII

SEQ ID NO: 45586 - protein, 10 aa, Artificial Sequence
  Peptide Derived from Human Papillomavirus
VYSPSPSGSI

SEQ ID NO: 45587 - protein, 9 aa, Artificial Sequence
  Peptide Derived from Human Papillomavirus
AFEPVDTTL

SEQ ID NO: 45588 - protein, 11 aa, Artificial Sequence
  Peptide Derived from Human Papillomavirus
AFEPVDTTLTF

SEQ ID NO: 45589 - protein, 9 aa, Artificial Sequence
  Peptide Derived from Human Papillomavirus
AFFKYSPTI

SEQ ID NO: 45590 - protein, 8 aa, Artificial Sequence
  Peptide Derived from Human Papillomavirus
AFSDPSII

SEQ ID NO: 45591 - protein, 8 aa, Artificial Sequence
  Peptide Derived from Human Papillomavirus
DFMDIIRL

SEQ ID NO: 45592 - protein, 9 aa, Artificial Sequence
  Peptide Derived from Human Papillomavirus
EFLTRPSSL

SEQ ID NO: 45593 - protein, 10 aa, Artificial Sequence
  Peptide Derived from Human Papillomavirus
EFLTRPSSLI

SEQ ID NO: 45594 - protein, 8 aa, Artificial Sequence
  Peptide Derived from Human Papillomavirus
EYIELQPL

SEQ ID NO: 45595 - protein, 8 aa, Artificial Sequence
  Peptide Derived from Human Papillomavirus
FFKYSPTI

SEQ ID NO: 45596 - protein, 8 aa, Artificial Sequence
  Peptide Derived from Human Papillomavirus
FYHDISPI

SEQ ID NO: 45597 - protein, 10 aa, Artificial Sequence
  Peptide Derived from Human Papillomavirus
GYEEIPLQTF

SEQ ID NO: 45598 - protein, 9 aa, Artificial Sequence
  Peptide Derived from Human Papillomavirus
HFYHDISPI

SEQ ID NO: 45599 - protein, 10 aa, Artificial Sequence
  Peptide Derived from Human Papillomavirus
HYYLWPLYYF

SEQ ID NO: 45600 - protein, 11 aa, Artificial Sequence
  Peptide Derived from Human Papillomavirus
HYYLWPLYYFI

SEQ ID NO: 45601 - protein, 8 aa, Artificial Sequence
  Peptide Derived from Human Papillomavirus
IFLGGLGI

SEQ ID NO: 45602 - protein, 8 aa, Artificial Sequence
  Peptide Derived from Human Papillomavirus
LWPLYYFI

SEQ ID NO: 45603 - protein, 9 aa, Artificial Sequence
  Peptide Derived from Human Papillomavirus
MFTRSGTQI

SEQ ID NO: 45604 - protein, 8 aa, Artificial Sequence
  Peptide Derived from Human Papillomavirus
PYFFADGF

SEQ ID NO: 45605 - protein, 8 aa, Artificial Sequence
  Peptide Derived from Human Papillomavirus
QWSSLGIF

SEQ ID NO: 45606 - protein, 9 aa, Artificial Sequence
  Peptide Derived from Human Papillomavirus
QWSSLGIFL

SEQ ID NO: 45607 - protein, 11 aa, Artificial Sequence
  Peptide Derived from Human Papillomavirus
SFAFFKYSPTI

SEQ ID NO: 45608 - protein, 9 aa, Artificial Sequence
  Peptide Derived from Human Papillomavirus
SYSNVTVPL

SEQ ID NO: 45609 - protein, 8 aa, Artificial Sequence
  Peptide Derived from Human Papillomavirus
TFTGTSGF

SEQ ID NO: 45610 - protein, 10 aa, Artificial Sequence
  Peptide Derived from Human Papillomavirus
TFTGTSGFDI

SEQ ID NO: 45611 - protein, 10 aa, Artificial Sequence
  Peptide Derived from Human Papillomavirus
TMFTRSGTQI

SEQ ID NO: 45612 - protein, 9 aa, Artificial Sequence
  Peptide Derived from Human Papillomavirus
VYTGPDITL

SEQ ID NO: 45613 - protein, 9 aa, Artificial Sequence
  Peptide Derived from Human Papillomavirus
YYLWPLYYF

SEQ ID NO: 45614 - protein, 10 aa, Artificial Sequence
  Peptide Derived from Human Papillomavirus
YYLWPLYYFI

SEQ ID NO: 45615 - protein, 11 aa, Artificial Sequence
  Peptide Derived from Human Papillomavirus
AFLKSNSQAKI

SEQ ID NO: 45616 - protein, 9 aa, Artificial Sequence
  Peptide Derived from Human Papillomavirus
AMLGKFKEL

SEQ ID NO: 45617 - protein, 9 aa, Artificial Sequence
  Peptide Derived from Human Papillomavirus
CMLIQPPKL

SEQ ID NO: 45618 - protein, 9 aa, Artificial Sequence
  Peptide Derived from Human Papillomavirus
CWHYIDNYL

SEQ ID NO: 45619 - protein, 8 aa, Artificial Sequence
  Peptide Derived from Human Papillomavirus
DWRDIVKF

SEQ ID NO: 45620 - protein, 9 aa, Artificial Sequence
  Peptide Derived from Human Papillomavirus
DWRDIVKFL

SEQ ID NO: 45621 - protein, 8 aa, Artificial Sequence
  Peptide Derived from Human Papillomavirus
DYNISPRL

SEQ ID NO: 45622 - protein, 11 aa, Artificial Sequence
  Peptide Derived from Human Papillomavirus
DYNISPRLKAI

SEQ ID NO: 45623 - protein, 9 aa, Artificial Sequence
  Peptide Derived from Human Papillomavirus
EFVSFLSAL

SEQ ID NO: 45624 - protein, 11 aa, Artificial Sequence
  Peptide Derived from Human Papillomavirus
EFVSFLSALKL

SEQ ID NO: 45625 - protein, 9 aa, Artificial Sequence
  Peptide Derived from Human Papillomavirus
EWIERQTVL

SEQ ID NO: 45626 - protein, 9 aa, Artificial Sequence
  Peptide Derived from Human Papillomavirus
FFSRTWCRL

SEQ ID NO: 45627 - protein, 11 aa, Artificial Sequence
  Peptide Derived from Human Papillomavirus
FFSRTWCRLNL

SEQ ID NO: 45628 - protein, 8 aa, Artificial Sequence
  Peptide Derived from Human Papillomavirus
FMELIRPF

SEQ ID NO: 45629 - protein, 11 aa, Artificial Sequence
  Peptide Derived from Human Papillomavirus
FWLQPLADAKI

SEQ ID NO: 45630 - protein, 11 aa, Artificial Sequence
  Peptide Derived from Human Papillomavirus
GFKTLLQPYCL

SEQ ID NO: 45631 - protein, 11 aa, Artificial Sequence
  Peptide Derived from Human Papillomavirus
GMLDDATTPCW

SEQ ID NO: 45632 - protein, 8 aa, Artificial Sequence
  Peptide Derived from Human Papillomavirus
GMSLISFL

SEQ ID NO: 45633 - protein, 10 aa, Artificial Sequence
  Peptide Derived from Human Papillomavirus
GMVMLMLVRF

SEQ ID NO: 45634 - protein, 9 aa, Artificial Sequence
  Peptide Derived from Human Papillomavirus
GWFYVEAVI

SEQ ID NO: 45635 - protein, 11 aa, Artificial Sequence
  Peptide Derived from Human Papillomavirus
HYIDNYLRNAL

SEQ ID NO: 45636 - protein, 10 aa, Artificial Sequence
  Peptide Derived from Human Papillomavirus
KFKELYGVSF

SEQ ID NO: 45637 - protein, 8 aa, Artificial Sequence
  Peptide Derived from Human Papillomavirus
KFLRYQQI

SEQ ID NO: 45638 - protein, 10 aa, Artificial Sequence
  Peptide Derived from Human Papillomavirus
KFLRYQQIEF

SEQ ID NO: 45639 - protein, 10 aa, Artificial Sequence
  Peptide Derived from Human Papillomavirus
KYVGSPLSDI

SEQ ID NO: 45640 - protein, 9 aa, Artificial Sequence
  Peptide Derived from Human Papillomavirus
LMQLKCPPL

SEQ ID NO: 45641 - protein, 10 aa, Artificial Sequence
  Peptide Derived from Human Papillomavirus
LMQLKCPPLL

SEQ ID NO: 45642 - protein, 11 aa, Artificial Sequence
  Peptide Derived from Human Papillomavirus
LMQLKCPPLLI

SEQ ID NO: 45643 - protein, 8 aa, Artificial Sequence
  Peptide Derived from Human Papillomavirus
LYCHLQSL

SEQ ID NO: 45644 - protein, 9 aa, Artificial Sequence
  Peptide Derived from Human Papillomavirus
LYGVSFMEL

SEQ ID NO: 45645 - protein, 10 aa, Artificial Sequence
  Peptide Derived from Human Papillomavirus
LYGVSFMELI

SEQ ID NO: 45646 - protein, 11 aa, Artificial Sequence
  Peptide Derived from Human Papillomavirus
LYWYRTGMSNI

SEQ ID NO: 45647 - protein, 10 aa, Artificial Sequence
  Peptide Derived from Human Papillomavirus
NWKSFFSRTW

SEQ ID NO: 45648 - protein, 8 aa, Artificial Sequence
  Peptide Derived from Human Papillomavirus
PYCLYCHL

SEQ ID NO: 45649 - protein, 11 aa, Artificial Sequence
  Peptide Derived from Human Papillomavirus
PYCLYCHLQSL

SEQ ID NO: 45650 - protein, 10 aa, Artificial Sequence
  Peptide Derived from Human Papillomavirus
PYLHSRLVVF

SEQ ID NO: 45651 - protein, 8 aa, Artificial Sequence
  Peptide Derived from Human Papillomavirus
QMSMGQWI

SEQ ID NO: 45652 - protein, 9 aa, Artificial Sequence
  Peptide Derived from Human Papillomavirus
RFKCAKNRI

SEQ ID NO: 45653 - protein, 11 aa, Artificial Sequence
  Peptide Derived from Human Papillomavirus
RFKCAKNRITI

SEQ ID NO: 45654 - protein, 9 aa, Artificial Sequence
  Peptide Derived from Human Papillomavirus
RWPYLHSRL

SEQ ID NO: 45655 - protein, 10 aa, Artificial Sequence
  Peptide Derived from Human Papillomavirus
RYQQIEFVSF

SEQ ID NO: 45656 - protein, 11 aa, Artificial Sequence
  Peptide Derived from Human Papillomavirus
RYQQIEFVSFL

SEQ ID NO: 45657 - protein, 10 aa, Artificial Sequence
  Peptide Derived from Human Papillomavirus
SFFSRTWCRL

SEQ ID NO: 45658 - protein, 8 aa, Artificial Sequence
  Peptide Derived from Human Papillomavirus
SFLQGCII

SEQ ID NO: 45659 - protein, 8 aa, Artificial Sequence
  Peptide Derived from Human Papillomavirus
SFLSALKL

SEQ ID NO: 45660 - protein, 9 aa, Artificial Sequence
  Peptide Derived from Human Papillomavirus
SFLSALKLF

SEQ ID NO: 45661 - protein, 10 aa, Artificial Sequence
  Peptide Derived from Human Papillomavirus
SFLSALKLFL

SEQ ID NO: 45662 - protein, 9 aa, Artificial Sequence
  Peptide Derived from Human Papillomavirus
SFMELIRPF

SEQ ID NO: 45663 - protein, 9 aa, Artificial Sequence
  Peptide Derived from Human Papillomavirus
SFNDTTFDL

SEQ ID NO: 45664 - protein, 9 aa, Artificial Sequence
  Peptide Derived from Human Papillomavirus
SWGMVMLML

SEQ ID NO: 45665 - protein, 9 aa, Artificial Sequence
  Peptide Derived from Human Papillomavirus
SYANSKSHF

SEQ ID NO: 45666 - protein, 10 aa, Artificial Sequence
  Peptide Derived from Human Papillomavirus
SYANSKSHFW

SEQ ID NO: 45667 - protein, 11 aa, Artificial Sequence
  Peptide Derived from Human Papillomavirus
SYANSKSHFWL

SEQ ID NO: 45668 - protein, 8 aa, Artificial Sequence
  Peptide Derived from Human Papillomavirus
SYFGMSLI

SEQ ID NO: 45669 - protein, 10 aa, Artificial Sequence
  Peptide Derived from Human Papillomavirus
SYFGMSLISF

SEQ ID NO: 45670 - protein, 11 aa, Artificial Sequence
  Peptide Derived from Human Papillomavirus
SYFGMSLISFL

SEQ ID NO: 45671 - protein, 10 aa, Artificial Sequence
  Peptide Derived from Human Papillomavirus
TFDLSQMVQW

SEQ ID NO: 45672 - protein, 10 aa, Artificial Sequence
  Peptide Derived from Human Papillomavirus
TFKCVSGQNI

SEQ ID NO: 45673 - protein, 8 aa, Artificial Sequence
  Peptide Derived from Human Papillomavirus
TFPNPFPF

SEQ ID NO: 45674 - protein, 8 aa, Artificial Sequence
  Peptide Derived from Human Papillomavirus
VFTFPNPF

SEQ ID NO: 45675 - protein, 10 aa, Artificial Sequence
  Peptide Derived from Human Papillomavirus
VFTFPNPFPF

SEQ ID NO: 45676 - protein, 8 aa, Artificial Sequence
  Peptide Derived from Human Papillomavirus
VMLMLVRF

SEQ ID NO: 45677 - protein, 9 aa, Artificial Sequence
  Peptide Derived from Human Papillomavirus
VYELSDKNW

SEQ ID NO: 45678 - protein, 8 aa, Artificial Sequence
  Peptide Derived from Human Papillomavirus
VYGETPEW

SEQ ID NO: 45679 - protein, 9 aa, Artificial Sequence
  Peptide Derived from Human Papillomavirus
VYGETPEWI

SEQ ID NO: 45680 - protein, 8 aa, Artificial Sequence
  Peptide Derived from Human Papillomavirus
WFYVEAVI

SEQ ID NO: 45681 - protein, 9 aa, Artificial Sequence
  Peptide Derived from Human Papillomavirus
WYRTGMSNI

SEQ ID NO: 45682 - protein, 9 aa, Artificial Sequence
  Peptide Derived from Human Papillomavirus
YFGMSLISF

SEQ ID NO: 45683 - protein, 10 aa, Artificial Sequence
  Peptide Derived from Human Papillomavirus
YFGMSLISFL

SEQ ID NO: 45684 - protein, 10 aa, Artificial Sequence
  Peptide Derived from Human Papillomavirus
YWYRTGMSNI

SEQ ID NO: 45685 - protein, 8 aa, Artificial Sequence
  Peptide Derived from Human Papillomavirus
DFLNTVKI

SEQ ID NO: 45686 - protein, 9 aa, Artificial Sequence
  Peptide Derived from Human Papillomavirus
DWTMQQTSL

SEQ ID NO: 45687 - protein, 11 aa, Artificial Sequence
  Peptide Derived from Human Papillomavirus
DWTMQQTSLEL

SEQ ID NO: 45688 - protein, 8 aa, Artificial Sequence
  Peptide Derived from Human Papillomavirus
DYWKHIRL

SEQ ID NO: 45689 - protein, 8 aa, Artificial Sequence
  Peptide Derived from Human Papillomavirus
GYTVEVQF

SEQ ID NO: 45690 - protein, 9 aa, Artificial Sequence
  Peptide Derived from Human Papillomavirus
HYENDSKRL

SEQ ID NO: 45691 - protein, 8 aa, Artificial Sequence
  Peptide Derived from Human Papillomavirus
HYTNWKFI

SEQ ID NO: 45692 - protein, 10 aa, Artificial Sequence
  Peptide Derived from Human Papillomavirus
HYTNWKFIYL

SEQ ID NO: 45693 - protein, 9 aa, Artificial Sequence
  Peptide Derived from Human Papillomavirus
IYYVHEGHI

SEQ ID NO: 45694 - protein, 11 aa, Artificial Sequence
  Peptide Derived from Human Papillomavirus
KWEVHAGGQVI

SEQ ID NO: 45695 - protein, 8 aa, Artificial Sequence
  Peptide Derived from Human Papillomavirus
KYGTGKKW

SEQ ID NO: 45696 - protein, 10 aa, Artificial Sequence
  Peptide Derived from Human Papillomavirus
LMYKAREMGI

SEQ ID NO: 45697 - protein, 9 aa, Artificial Sequence
  Peptide Derived from Human Papillomavirus
LYEQVSSTW

SEQ ID NO: 45698 - protein, 11 aa, Artificial Sequence
  Peptide Derived from Human Papillomavirus
LYEQVSSTWHW

SEQ ID NO: 45699 - protein, 10 aa, Artificial Sequence
  Peptide Derived from Human Papillomavirus
LYLTAPTGCL

SEQ ID NO: 45700 - protein, 9 aa, Artificial Sequence
  Peptide Derived from Human Papillomavirus
MYKAREMGI

SEQ ID NO: 45701 - protein, 9 aa, Artificial Sequence
  Peptide Derived from Human Papillomavirus
NWKFIYLCI

SEQ ID NO: 45702 - protein, 10 aa, Artificial Sequence
  Peptide Derived from Human Papillomavirus
RYRLSKYKQL

SEQ ID NO: 45703 - protein, 9 aa, Artificial Sequence
  Peptide Derived from Human Papillomavirus
SFAGIVTKL

SEQ ID NO: 45704 - protein, 9 aa, Artificial Sequence
  Peptide Derived from Human Papillomavirus
TMHYTNWKF

SEQ ID NO: 45705 - protein, 10 aa, Artificial Sequence
  Peptide Derived from Human Papillomavirus
TMHYTNWKFI

SEQ ID NO: 45706 - protein, 9 aa, Artificial Sequence
  Peptide Derived from Human Papillomavirus
TMQQTSLEL

SEQ ID NO: 45707 - protein, 11 aa, Artificial Sequence
  Peptide Derived from Human Papillomavirus
TMQQTSLELYL

SEQ ID NO: 45708 - protein, 11 aa, Artificial Sequence
  Peptide Derived from Human Papillomavirus
TYISTSQRDDF

SEQ ID NO: 45709 - protein, 9 aa, Artificial Sequence
  Peptide Derived from Human Papillomavirus
VFSSDEISF

SEQ ID NO: 45710 - protein, 11 aa, Artificial Sequence
  Peptide Derived from Human Papillomavirus
YWKHIRLECVL

SEQ ID NO: 45711 - protein, 8 aa, Artificial Sequence
  Peptide Derived from Human Papillomavirus
YYVHEGHI

SEQ ID NO: 45712 - protein, 11 aa, Artificial Sequence
  Peptide Derived from Human Papillomavirus
YYVHEGHITYF

SEQ ID NO: 45713 - protein, 8 aa, Artificial Sequence
  Peptide Derived from Human Papillomavirus
CFCIYVVF

SEQ ID NO: 45714 - protein, 9 aa, Artificial Sequence
  Peptide Derived from Human Papillomavirus
CFCIYVVFI

SEQ ID NO: 45715 - protein, 11 aa, Artificial Sequence
  Peptide Derived from Human Papillomavirus
CFCIYVVFIYI

SEQ ID NO: 45716 - protein, 10 aa, Artificial Sequence
  Peptide Derived from Human Papillomavirus
CFCVLLFVCL

SEQ ID NO: 45717 - protein, 9 aa, Artificial Sequence
  Peptide Derived from Human Papillomavirus
CFLLCFCVL

SEQ ID NO: 45718 - protein, 10 aa, Artificial Sequence
  Peptide Derived from Human Papillomavirus
CFLLCFCVLL

SEQ ID NO: 45719 - protein, 11 aa, Artificial Sequence
  Peptide Derived from Human Papillomavirus
CFLLCFCVLLF

SEQ ID NO: 45720 - protein, 8 aa, Artificial Sequence
  Peptide Derived from Human Papillomavirus
IYIPLFVI

SEQ ID NO: 45721 - protein, 8 aa, Artificial Sequence
  Peptide Derived from Human Papillomavirus
IYVVFIYI

SEQ ID NO: 45722 - protein, 10 aa, Artificial Sequence
  Peptide Derived from Human Papillomavirus
IYVVFIYIPL

SEQ ID NO: 45723 - protein, 11 aa, Artificial Sequence
  Peptide Derived from Human Papillomavirus
IYVVFIYIPLF

SEQ ID NO: 45724 - protein, 10 aa, Artificial Sequence
  Peptide Derived from Human Papillomavirus
LFVCLVIRPL

SEQ ID NO: 45725 - protein, 10 aa, Artificial Sequence
  Peptide Derived from Human Papillomavirus
LFVIHTHASF

SEQ ID NO: 45726 - protein, 11 aa, Artificial Sequence
  Peptide Derived from Human Papillomavirus
LFVIHTHASFL

SEQ ID NO: 45727 - protein, 9 aa, Artificial Sequence
  Peptide Derived from Human Papillomavirus
LWVIATSPL

SEQ ID NO: 45728 - protein, 8 aa, Artificial Sequence
  Peptide Derived from Human Papillomavirus
VFIYIPLF

SEQ ID NO: 45729 - protein, 10 aa, Artificial Sequence
  Peptide Derived from Human Papillomavirus
VFIYIPLFVI

SEQ ID NO: 45730 - protein, 8 aa, Artificial Sequence
  Peptide Derived from Human Papillomavirus
VYATLLLL

SEQ ID NO: 45731 - protein, 9 aa, Artificial Sequence
  Peptide Derived from Human Papillomavirus
VYATLLLLI

SEQ ID NO: 45732 - protein, 11 aa, Artificial Sequence
  Peptide Derived from Human Papillomavirus
VYATLLLLIVI

SEQ ID NO: 45733 - protein, 9 aa, Artificial Sequence
  Peptide Derived from Human Papillomavirus
DFAFTDLTI

SEQ ID NO: 45734 - protein, 8 aa, Artificial Sequence
  Peptide Derived from Human Papillomavirus
FYSKVSEF

SEQ ID NO: 45735 - protein, 10 aa, Artificial Sequence
  Peptide Derived from Human Papillomavirus
FYSKVSEFRW

SEQ ID NO: 45736 - protein, 9 aa, Artificial Sequence
  Peptide Derived from Human Papillomavirus
RFHNIGGRW

SEQ ID NO: 45737 - protein, 9 aa, Artificial Sequence
  Peptide Derived from Human Papillomavirus
RFYSKVSEF

SEQ ID NO: 45738 - protein, 11 aa, Artificial Sequence
  Peptide Derived from Human Papillomavirus
RFYSKVSEFRW

SEQ ID NO: 45739 - protein, 10 aa, Artificial Sequence
  Peptide Derived from Human Papillomavirus
RWTGRCIACW

SEQ ID NO: 45740 - protein, 9 aa, Artificial Sequence
  Peptide Derived from Human Papillomavirus
RYSVYGTTL

SEQ ID NO: 45741 - protein, 9 aa, Artificial Sequence
  Peptide Derived from Human Papillomavirus
VYGTTLEKL

SEQ ID NO: 45742 - protein, 11 aa, Artificial Sequence
  Peptide Derived from Human Papillomavirus
WYRYSVYGTTL

SEQ ID NO: 45743 - protein, 10 aa, Artificial Sequence
  Peptide Derived from Human Papillomavirus
TFCCQCKSTL

SEQ ID NO: 45744 - protein, 9 aa, Artificial Sequence
  Peptide Derived from Human Papillomavirus
DYKQTQLCL

SEQ ID NO: 45745 - protein, 10 aa, Artificial Sequence
  Peptide Derived from Human Papillomavirus
DYKQTQLCLL

SEQ ID NO: 45746 - protein, 9 aa, Artificial Sequence
  Peptide Derived from Human Papillomavirus
DYVFWEVNL

SEQ ID NO: 45747 - protein, 8 aa, Artificial Sequence
  Peptide Derived from Human Papillomavirus
EFDLQFIF

SEQ ID NO: 45748 - protein, 10 aa, Artificial Sequence
  Peptide Derived from Human Papillomavirus
EFDLQFIFQL

SEQ ID NO: 45749 - protein, 9 aa, Artificial Sequence
  Peptide Derived from Human Papillomavirus
EYLRHGEEF

SEQ ID NO: 45750 - protein, 11 aa, Artificial Sequence
  Peptide Derived from Human Papillomavirus
EYLRHGEEFDL

SEQ ID NO: 45751 - protein, 8 aa, Artificial Sequence
  Peptide Derived from Human Papillomavirus
EYVTRTNI

SEQ ID NO: 45752 - protein, 10 aa, Artificial Sequence
  Peptide Derived from Human Papillomavirus
FFYLRREQMF

SEQ ID NO: 45753 - protein, 10 aa, Artificial Sequence
  Peptide Derived from Human Papillomavirus
FWEVNLKEKF

SEQ ID NO: 45754 - protein, 9 aa, Artificial Sequence
  Peptide Derived from Human Papillomavirus
FYLRREQMF

SEQ ID NO: 45755 - protein, 9 aa, Artificial Sequence
  Peptide Derived from Human Papillomavirus
FYNPETQRL

SEQ ID NO: 45756 - protein, 11 aa, Artificial Sequence
  Peptide Derived from Human Papillomavirus
FYNPETQRLVW

SEQ ID NO: 45757 - protein, 10 aa, Artificial Sequence
  Peptide Derived from Human Papillomavirus
GFGAMDFTAL

SEQ ID NO: 45758 - protein, 8 aa, Artificial Sequence
  Peptide Derived from Human Papillomavirus
GYRARPKF

SEQ ID NO: 45759 - protein, 9 aa, Artificial Sequence
  Peptide Derived from Human Papillomavirus
IFQLCKITL

SEQ ID NO: 45760 - protein, 10 aa, Artificial Sequence
  Peptide Derived from Human Papillomavirus
IYYHAGSARL

SEQ ID NO: 45761 - protein, 11 aa, Artificial Sequence
  Peptide Derived from Human Papillomavirus
IYYHAGSARLL

SEQ ID NO: 45762 - protein, 9 aa, Artificial Sequence
  Peptide Derived from Human Papillomavirus
KFGFPDTSF

SEQ ID NO: 45763 - protein, 9 aa, Artificial Sequence
  Peptide Derived from Human Papillomavirus
KFSADLDQF

SEQ ID NO: 45764 - protein, 11 aa, Artificial Sequence
  Peptide Derived from Human Papillomavirus
KFSADLDQFPL

SEQ ID NO: 45765 - protein, 11 aa, Artificial Sequence
  Peptide Derived from Human Papillomavirus
KMVAEPYGDTL

SEQ ID NO: 45766 - protein, 11 aa, Artificial Sequence
  Peptide Derived from Human Papillomavirus
LFFYLRREQMF

SEQ ID NO: 45767 - protein, 11 aa, Artificial Sequence
  Peptide Derived from Human Papillomavirus
LWRPSEATVYL

SEQ ID NO: 45768 - protein, 8 aa, Artificial Sequence
  Peptide Derived from Human Papillomavirus
NMSVCAAI

SEQ ID NO: 45769 - protein, 8 aa, Artificial Sequence
  Peptide Derived from Human Papillomavirus
PFKDYVFW

SEQ ID NO: 45770 - protein, 8 aa, Artificial Sequence
  Peptide Derived from Human Papillomavirus
PYGDTLFF

SEQ ID NO: 45771 - protein, 10 aa, Artificial Sequence
  Peptide Derived from Human Papillomavirus
PYGDTLFFYL

SEQ ID NO: 45772 - protein, 9 aa, Artificial Sequence
  Peptide Derived from Human Papillomavirus
QFIFQLCKI

SEQ ID NO: 45773 - protein, 11 aa, Artificial Sequence
  Peptide Derived from Human Papillomavirus
QFIFQLCKITL

SEQ ID NO: 45774 - protein, 8 aa, Artificial Sequence
  Peptide Derived from Human Papillomavirus
QFPLGRKF

SEQ ID NO: 45775 - protein, 9 aa, Artificial Sequence
  Peptide Derived from Human Papillomavirus
QFPLGRKFL

SEQ ID NO: 45776 - protein, 10 aa, Artificial Sequence
  Peptide Derived from Human Papillomavirus
QFPLGRKFLL

SEQ ID NO: 45777 - protein, 8 aa, Artificial Sequence
  Peptide Derived from Human Papillomavirus
QMFVRHFF

SEQ ID NO: 45778 - protein, 9 aa, Artificial Sequence
  Peptide Derived from Human Papillomavirus
QYRVFRVRL

SEQ ID NO: 45779 - protein, 8 aa, Artificial Sequence
  Peptide Derived from Human Papillomavirus
RFVTSQAI

SEQ ID NO: 45780 - protein, 10 aa, Artificial Sequence
  Peptide Derived from Human Papillomavirus
SFYNPETQRL

SEQ ID NO: 45781 - protein, 9 aa, Artificial Sequence
  Peptide Derived from Human Papillomavirus
SMDYKQTQL

SEQ ID NO: 45782 - protein, 11 aa, Artificial Sequence
  Peptide Derived from Human Papillomavirus
SMDYKQTQLCL

SEQ ID NO: 45783 - protein, 10 aa, Artificial Sequence
  Peptide Derived from Human Papillomavirus
SMNPAILEDW

SEQ ID NO: 45784 - protein, 9 aa, Artificial Sequence
  Peptide Derived from Human Papillomavirus
SMVTSDAQI

SEQ ID NO: 45785 - protein, 10 aa, Artificial Sequence
  Peptide Derived from Human Papillomavirus
SMVTSDAQIF

SEQ ID NO: 45786 - protein, 11 aa, Artificial Sequence
  Peptide Derived from Human Papillomavirus
TFKSSNFKEYL

SEQ ID NO: 45787 - protein, 10 aa, Artificial Sequence
  Peptide Derived from Human Papillomavirus
TYIHSMNPAI

SEQ ID NO: 45788 - protein, 11 aa, Artificial Sequence
  Peptide Derived from Human Papillomavirus
TYIHSMNPAIL

SEQ ID NO: 45789 - protein, 10 aa, Artificial Sequence
  Peptide Derived from Human Papillomavirus
TYRFVTSQAI

SEQ ID NO: 45790 - protein, 11 aa, Artificial Sequence
  Peptide Derived from Human Papillomavirus
VFWEVNLKEKF

SEQ ID NO: 45791 - protein, 9 aa, Artificial Sequence
  Peptide Derived from Human Papillomavirus
YYHAGSARL

SEQ ID NO: 45792 - protein, 10 aa, Artificial Sequence
  Peptide Derived from Human Papillomavirus
YYHAGSARLL

SEQ ID NO: 45793 - protein, 11 aa, Artificial Sequence
  Peptide Derived from Human Papillomavirus
AYETVNAEESL

SEQ ID NO: 45794 - protein, 11 aa, Artificial Sequence
  Peptide Derived from Human Papillomavirus
AYVPTNTTVPL

SEQ ID NO: 45795 - protein, 8 aa, Artificial Sequence
  Peptide Derived from Human Papillomavirus
DFLDIIAL

SEQ ID NO: 45796 - protein, 11 aa, Artificial Sequence
  Peptide Derived from Human Papillomavirus
DFYLHPSYYML

SEQ ID NO: 45797 - protein, 10 aa, Artificial Sequence
  Peptide Derived from Human Papillomavirus
FYLHPSYYML

SEQ ID NO: 45798 - protein, 9 aa, Artificial Sequence
  Peptide Derived from Human Papillomavirus
HYYYDISSI

SEQ ID NO: 45799 - protein, 9 aa, Artificial Sequence
  Peptide Derived from Human Papillomavirus
IFSGPDVPI

SEQ ID NO: 45800 - protein, 8 aa, Artificial Sequence
  Peptide Derived from Human Papillomavirus
IFVDGGDF

SEQ ID NO: 45801 - protein, 10 aa, Artificial Sequence
  Peptide Derived from Human Papillomavirus
IFVDGGDFYL

SEQ ID NO: 45802 - protein, 10 aa, Artificial Sequence
  Peptide Derived from Human Papillomavirus
LYDIYADTDF

SEQ ID NO: 45803 - protein, 10 aa, Artificial Sequence
  Peptide Derived from Human Papillomavirus
LYFSNTSHNI

SEQ ID NO: 45804 - protein, 10 aa, Artificial Sequence
  Peptide Derived from Human Papillomavirus
NYEEIPMDTF

SEQ ID NO: 45805 - protein, 11 aa, Artificial Sequence
  Peptide Derived from Human Papillomavirus
NYEEIPMDTFI

SEQ ID NO: 45806 - protein, 8 aa, Artificial Sequence
  Peptide Derived from Human Papillomavirus
RYGSMGVF

SEQ ID NO: 45807 - protein, 9 aa, Artificial Sequence
  Peptide Derived from Human Papillomavirus
RYGSMGVFF

SEQ ID NO: 45808 - protein, 11 aa, Artificial Sequence
  Peptide Derived from Human Papillomavirus
RYSRLGNKQTL

SEQ ID NO: 45809 - protein, 9 aa, Artificial Sequence
  Peptide Derived from Human Papillomavirus
SMGVFFGGL

SEQ ID NO: 45810 - protein, 11 aa, Artificial Sequence
  Peptide Derived from Human Papillomavirus
SMGVFFGGLGI

SEQ ID NO: 45811 - protein, 11 aa, Artificial Sequence
  Peptide Derived from Human Papillomavirus
TFIVSTNNENI

SEQ ID NO: 45812 - protein, 9 aa, Artificial Sequence
  Peptide Derived from Human Papillomavirus
TFLSAPKQL

SEQ ID NO: 45813 - protein, 10 aa, Artificial Sequence
  Peptide Derived from Human Papillomavirus
TFLSAPKQLI

SEQ ID NO: 45814 - protein, 8 aa, Artificial Sequence
  Peptide Derived from Human Papillomavirus
TFTDPSVL

SEQ ID NO: 45815 - protein, 8 aa, Artificial Sequence
  Peptide Derived from Human Papillomavirus
VFFGGLGI

SEQ ID NO: 45816 - protein, 9 aa, Artificial Sequence
  Peptide Derived from Human Papillomavirus
YFSNTSHNI

SEQ ID NO: 45817 - protein, 8 aa, Artificial Sequence
  Peptide Derived from Human Papillomavirus
YYYDISSI

SEQ ID NO: 45818 - protein, 9 aa, Artificial Sequence
  Peptide Derived from Human Papillomavirus
AFKKFLKGI

SEQ ID NO: 45819 - protein, 9 aa, Artificial Sequence
  Peptide Derived from Human Papillomavirus
AFLGAFKKF

SEQ ID NO: 45820 - protein, 10 aa, Artificial Sequence
  Peptide Derived from Human Papillomavirus
AFLGAFKKFL

SEQ ID NO: 45821 - protein, 11 aa, Artificial Sequence
  Peptide Derived from Human Papillomavirus
AFLKSNSQAKI

SEQ ID NO: 45822 - protein, 9 aa, Artificial Sequence
  Peptide Derived from Human Papillomavirus
AYGISFMEL

SEQ ID NO: 45823 - protein, 9 aa, Artificial Sequence
  Peptide Derived from Human Papillomavirus
CMVIEPPKL

SEQ ID NO: 45824 - protein, 9 aa, Artificial Sequence
  Peptide Derived from Human Papillomavirus
DWCITGYGI

SEQ ID NO: 45825 - protein, 11 aa, Artificial Sequence
  Peptide Derived from Human Papillomavirus
EFIDDSMENSI

SEQ ID NO: 45826 - protein, 8 aa, Artificial Sequence
  Peptide Derived from Human Papillomavirus
EFKNPFPF

SEQ ID NO: 45827 - protein, 9 aa, Artificial Sequence
  Peptide Derived from Human Papillomavirus
EFTAFLGAF

SEQ ID NO: 45828 - protein, 11 aa, Artificial Sequence
  Peptide Derived from Human Papillomavirus
EMVQWAYDNEL

SEQ ID NO: 45829 - protein, 9 aa, Artificial Sequence
  Peptide Derived from Human Papillomavirus
EWIDRLTVL

SEQ ID NO: 45830 - protein, 9 aa, Artificial Sequence
  Peptide Derived from Human Papillomavirus
FFSRTWCKL

SEQ ID NO: 45831 - protein, 11 aa, Artificial Sequence
  Peptide Derived from Human Papillomavirus
FFSRTWCKLDL

SEQ ID NO: 45832 - protein, 8 aa, Artificial Sequence
  Peptide Derived from Human Papillomavirus
FMELVRPF

SEQ ID NO: 45833 - protein, 11 aa, Artificial Sequence
  Peptide Derived from Human Papillomavirus
FWLQPLSDAKI

SEQ ID NO: 45834 - protein, 8 aa, Artificial Sequence
  Peptide Derived from Human Papillomavirus
GMGCTGWF

SEQ ID NO: 45835 - protein, 9 aa, Artificial Sequence
  Peptide Derived from Human Papillomavirus
GMIDDVTPI

SEQ ID NO: 45836 - protein, 11 aa, Artificial Sequence
  Peptide Derived from Human Papillomavirus
GMIDDVTPISW

SEQ ID NO: 45837 - protein, 8 aa, Artificial Sequence
  Peptide Derived from Human Papillomavirus
GMSLIQFL

SEQ ID NO: 45838 - protein, 9 aa, Artificial Sequence
  Peptide Derived from Human Papillomavirus
GWFEVEAVI

SEQ ID NO: 45839 - protein, 10 aa, Artificial Sequence
  Peptide Derived from Human Papillomavirus
IFDLSEMVQW

SEQ ID NO: 45840 - protein, 8 aa, Artificial Sequence
  Peptide Derived from Human Papillomavirus
KFKEAYGI

SEQ ID NO: 45841 - protein, 10 aa, Artificial Sequence
  Peptide Derived from Human Papillomavirus
KFKEAYGISF

SEQ ID NO: 45842 - protein, 8 aa, Artificial Sequence
  Peptide Derived from Human Papillomavirus
KMSIGQWI

SEQ ID NO: 45843 - protein, 11 aa, Artificial Sequence
  Peptide Derived from Human Papillomavirus
LFNIQEGEDDL

SEQ ID NO: 45844 - protein, 8 aa, Artificial Sequence
  Peptide Derived from Human Papillomavirus
LMSNLLSI

SEQ ID NO: 45845 - protein, 10 aa, Artificial Sequence
  Peptide Derived from Human Papillomavirus
LYKFKEAYGI

SEQ ID NO: 45846 - protein, 8 aa, Artificial Sequence
  Peptide Derived from Human Papillomavirus
LYTHLQCL

SEQ ID NO: 45847 - protein, 11 aa, Artificial Sequence
  Peptide Derived from Human Papillomavirus
LYWFRTAMSNI

SEQ ID NO: 45848 - protein, 10 aa, Artificial Sequence
  Peptide Derived from Human Papillomavirus
NWKSFFSRTW

SEQ ID NO: 45849 - protein, 8 aa, Artificial Sequence
  Peptide Derived from Human Papillomavirus
NWRPIVQL

SEQ ID NO: 45850 - protein, 9 aa, Artificial Sequence
  Peptide Derived from Human Papillomavirus
NWRPIVQLL

SEQ ID NO: 45851 - protein, 10 aa, Artificial Sequence
  Peptide Derived from Human Papillomavirus
PYLHSRLTVF

SEQ ID NO: 45852 - protein, 8 aa, Artificial Sequence
  Peptide Derived from Human Papillomavirus
QFLKGCVI

SEQ ID NO: 45853 - protein, 8 aa, Artificial Sequence
  Peptide Derived from Human Papillomavirus
QWAYDNEL

SEQ ID NO: 45854 - protein, 9 aa, Artificial Sequence
  Peptide Derived from Human Papillomavirus
RFRCSKNRL

SEQ ID NO: 45855 - protein, 9 aa, Artificial Sequence
  Peptide Derived from Human Papillomavirus
RWPYLHSRL

SEQ ID NO: 45856 - protein, 10 aa, Artificial Sequence
  Peptide Derived from Human Papillomavirus
RYQNIEFTAF

SEQ ID NO: 45857 - protein, 11 aa, Artificial Sequence
  Peptide Derived from Human Papillomavirus
RYQNIEFTAFL

SEQ ID NO: 45858 - protein, 10 aa, Artificial Sequence
  Peptide Derived from Human Papillomavirus
SFFSRTWCKL

SEQ ID NO: 45859 - protein, 9 aa, Artificial Sequence
  Peptide Derived from Human Papillomavirus
SFMELVRPF

SEQ ID NO: 45860 - protein, 9 aa, Artificial Sequence
  Peptide Derived from Human Papillomavirus
SFNDNIFDL

SEQ ID NO: 45861 - protein, 8 aa, Artificial Sequence
  Peptide Derived from Human Papillomavirus
SYFGMSLI

SEQ ID NO: 45862 - protein, 10 aa, Artificial Sequence
  Peptide Derived from Human Papillomavirus
SYFGMSLIQF

SEQ ID NO: 45863 - protein, 11 aa, Artificial Sequence
  Peptide Derived from Human Papillomavirus
SYFGMSLIQFL

SEQ ID NO: 45864 - protein, 8 aa, Artificial Sequence
  Peptide Derived from Human Papillomavirus
TWCKLDLI

SEQ ID NO: 45865 - protein, 11 aa, Artificial Sequence
  Peptide Derived from Human Papillomavirus
TYIDDYMRNAL

SEQ ID NO: 45866 - protein, 10 aa, Artificial Sequence
  Peptide Derived from Human Papillomavirus
TYRKRKIDEL

SEQ ID NO: 45867 - protein, 8 aa, Artificial Sequence
  Peptide Derived from Human Papillomavirus
VFEFKNPF

SEQ ID NO: 45868 - protein, 10 aa, Artificial Sequence
  Peptide Derived from Human Papillomavirus
VFEFKNPFPF

SEQ ID NO: 45869 - protein, 9 aa, Artificial Sequence
  Peptide Derived from Human Papillomavirus
VYAINDENW

SEQ ID NO: 45870 - protein, 8 aa, Artificial Sequence
  Peptide Derived from Human Papillomavirus
WFEVEAVI

SEQ ID NO: 45871 - protein, 9 aa, Artificial Sequence
  Peptide Derived from Human Papillomavirus
WFRTAMSNI

SEQ ID NO: 45872 - protein, 9 aa, Artificial Sequence
  Peptide Derived from Human Papillomavirus
YFGMSLIQF

SEQ ID NO: 45873 - protein, 10 aa, Artificial Sequence
  Peptide Derived from Human Papillomavirus
YFGMSLIQFL

SEQ ID NO: 45874 - protein, 11 aa, Artificial Sequence
  Peptide Derived from Human Papillomavirus
YMRNALDGNEI

SEQ ID NO: 45875 - protein, 10 aa, Artificial Sequence
  Peptide Derived from Human Papillomavirus
YWFRTAMSNI

SEQ ID NO: 45876 - protein, 11 aa, Artificial Sequence
  Peptide Derived from Human Papillomavirus
AFQVIELQMAL

SEQ ID NO: 45877 - protein, 8 aa, Artificial Sequence
  Peptide Derived from Human Papillomavirus
DYIGMYYI

SEQ ID NO: 45878 - protein, 8 aa, Artificial Sequence
  Peptide Derived from Human Papillomavirus
DYTNWGEI

SEQ ID NO: 45879 - protein, 10 aa, Artificial Sequence
  Peptide Derived from Human Papillomavirus
DYTNWGEIYI

SEQ ID NO: 45880 - protein, 11 aa, Artificial Sequence
  Peptide Derived from Human Papillomavirus
DYTNWGEIYII

SEQ ID NO: 45881 - protein, 11 aa, Artificial Sequence
  Peptide Derived from Human Papillomavirus
HWKLIRMECAL

SEQ ID NO: 45882 - protein, 8 aa, Artificial Sequence
  Peptide Derived from Human Papillomavirus
KYSKTQMW

SEQ ID NO: 45883 - protein, 8 aa, Artificial Sequence
  Peptide Derived from Human Papillomavirus
LFCADPAL

SEQ ID NO: 45884 - protein, 9 aa, Artificial Sequence
  Peptide Derived from Human Papillomavirus
LYEADKTDL

SEQ ID NO: 45885 - protein, 9 aa, Artificial Sequence
  Peptide Derived from Human Papillomavirus
LYSSMSSTW

SEQ ID NO: 45886 - protein, 11 aa, Artificial Sequence
  Peptide Derived from Human Papillomavirus
LYSSMSSTWHW

SEQ ID NO: 45887 - protein, 9 aa, Artificial Sequence
  Peptide Derived from Human Papillomavirus
LYTAKQMGF

SEQ ID NO: 45888 - protein, 8 aa, Artificial Sequence
  Peptide Derived from Human Papillomavirus
MFLGTVKI

SEQ ID NO: 45889 - protein, 11 aa, Artificial Sequence
  Peptide Derived from Human Papillomavirus
MWEVHVGGQVI

SEQ ID NO: 45890 - protein, 8 aa, Artificial Sequence
  Peptide Derived from Human Papillomavirus
NWGEIYII

SEQ ID NO: 45891 - protein, 9 aa, Artificial Sequence
  Peptide Derived from Human Papillomavirus
QMFLGTVKI

SEQ ID NO: 45892 - protein, 9 aa, Artificial Sequence
  Peptide Derived from Human Papillomavirus
QWTLQQTSL

SEQ ID NO: 45893 - protein, 9 aa, Artificial Sequence
  Peptide Derived from Human Papillomavirus
QYSTSQWTL

SEQ ID NO: 45894 - protein, 10 aa, Artificial Sequence
  Peptide Derived from Human Papillomavirus
RYRLKPYKEL

SEQ ID NO: 45895 - protein, 8 aa, Artificial Sequence
  Peptide Derived from Human Papillomavirus
SMSSTWHW

SEQ ID NO: 45896 - protein, 11 aa, Artificial Sequence
  Peptide Derived from Human Papillomavirus
TFVTEQQQQMF

SEQ ID NO: 45897 - protein, 10 aa, Artificial Sequence
  Peptide Derived from Human Papillomavirus
TMDYTNWGEI

SEQ ID NO: 45898 - protein, 10 aa, Artificial Sequence
  Peptide Derived from Human Papillomavirus
TMVTGKVDYI

SEQ ID NO: 45899 - protein, 10 aa, Artificial Sequence
  Peptide Derived from Human Papillomavirus
VWLCEPPKCF

SEQ ID NO: 45900 - protein, 11 aa, Artificial Sequence
  Peptide Derived from Human Papillomavirus
YYIHNCEKVYF

SEQ ID NO: 45901 - protein, 8 aa, Artificial Sequence
  Peptide Derived from Human Papillomavirus
AWLLVLVL

SEQ ID NO: 45902 - protein, 9 aa, Artificial Sequence
  Peptide Derived from Human Papillomavirus
AWLLVLVLL

SEQ ID NO: 45903 - protein, 10 aa, Artificial Sequence
  Peptide Derived from Human Papillomavirus
AWLLVLVLLL

SEQ ID NO: 45904 - protein, 11 aa, Artificial Sequence
  Peptide Derived from Human Papillomavirus
AWLLVLVLLLW

SEQ ID NO: 45905 - protein, 8 aa, Artificial Sequence
  Peptide Derived from Human Papillomavirus
CFILFLCL

SEQ ID NO: 45906 - protein, 10 aa, Artificial Sequence
  Peptide Derived from Human Papillomavirus
CFILFLCLSL

SEQ ID NO: 45907 - protein, 11 aa, Artificial Sequence
  Peptide Derived from Human Papillomavirus
CFILFLCLSLL

SEQ ID NO: 45908 - protein, 8 aa, Artificial Sequence
  Peptide Derived from Human Papillomavirus
CYLLFLYL

SEQ ID NO: 45909 - protein, 8 aa, Artificial Sequence
  Peptide Derived from Human Papillomavirus
FFCYLLFL

SEQ ID NO: 45910 - protein, 10 aa, Artificial Sequence
  Peptide Derived from Human Papillomavirus
FFCYLLFLYL

SEQ ID NO: 45911 - protein, 8 aa, Artificial Sequence
  Peptide Derived from Human Papillomavirus
IFFCYLLF

SEQ ID NO: 45912 - protein, 9 aa, Artificial Sequence
  Peptide Derived from Human Papillomavirus
IFFCYLLFL

SEQ ID NO: 45913 - protein, 11 aa, Artificial Sequence
  Peptide Derived from Human Papillomavirus
IFFCYLLFLYL

SEQ ID NO: 45914 - protein, 8 aa, Artificial Sequence
  Peptide Derived from Human Papillomavirus
IFVFVLCF

SEQ ID NO: 45915 - protein, 9 aa, Artificial Sequence
  Peptide Derived from Human Papillomavirus
IFVFVLCFI

SEQ ID NO: 45916 - protein, 10 aa, Artificial Sequence
  Peptide Derived from Human Papillomavirus
IFVFVLCFIL

SEQ ID NO: 45917 - protein, 11 aa, Artificial Sequence
  Peptide Derived from Human Papillomavirus
IFVFVLCFILF

SEQ ID NO: 45918 - protein, 8 aa, Artificial Sequence
  Peptide Derived from Human Papillomavirus
LFLCLSLL

SEQ ID NO: 45919 - protein, 9 aa, Artificial Sequence
  Peptide Derived from Human Papillomavirus
LFLCLSLLL

SEQ ID NO: 45920 - protein, 10 aa, Artificial Sequence
  Peptide Derived from Human Papillomavirus
LFLYLPMMCI

SEQ ID NO: 45921 - protein, 9 aa, Artificial Sequence
  Peptide Derived from Human Papillomavirus
LWVFVGSPL

SEQ ID NO: 45922 - protein, 11 aa, Artificial Sequence
  Peptide Derived from Human Papillomavirus
LWVFVGSPLKI

SEQ ID NO: 45923 - protein, 8 aa, Artificial Sequence
  Peptide Derived from Human Papillomavirus
LYLPMMCI

SEQ ID NO: 45924 - protein, 10 aa, Artificial Sequence
  Peptide Derived from Human Papillomavirus
LYLPMMCINF

SEQ ID NO: 45925 - protein, 8 aa, Artificial Sequence
  Peptide Derived from Human Papillomavirus
TYAWLLVL

SEQ ID NO: 45926 - protein, 10 aa, Artificial Sequence
  Peptide Derived from Human Papillomavirus
TYAWLLVLVL

SEQ ID NO: 45927 - protein, 11 aa, Artificial Sequence
  Peptide Derived from Human Papillomavirus
TYAWLLVLVLL

SEQ ID NO: 45928 - protein, 9 aa, Artificial Sequence
  Peptide Derived from Human Papillomavirus
VFVGSPLKI

SEQ ID NO: 45929 - protein, 10 aa, Artificial Sequence
  Peptide Derived from Human Papillomavirus
VFVGSPLKIF

SEQ ID NO: 45930 - protein, 11 aa, Artificial Sequence
  Peptide Derived from Human Papillomavirus
VFVGSPLKIFF

SEQ ID NO: 45931 - protein, 8 aa, Artificial Sequence
  Peptide Derived from Human Papillomavirus
VFVLCFIL

SEQ ID NO: 45932 - protein, 9 aa, Artificial Sequence
  Peptide Derived from Human Papillomavirus
VFVLCFILF

SEQ ID NO: 45933 - protein, 10 aa, Artificial Sequence
  Peptide Derived from Human Papillomavirus
VFVLCFILFL

SEQ ID NO: 45934 - protein, 11 aa, Artificial Sequence
  Peptide Derived from Human Papillomavirus
CWRSRRRETAL

SEQ ID NO: 45935 - protein, 11 aa, Artificial Sequence
  Peptide Derived from Human Papillomavirus
HYNYSVYGNTL

SEQ ID NO: 45936 - protein, 9 aa, Artificial Sequence
  Peptide Derived from Human Papillomavirus
NYSVYGNTL

SEQ ID NO: 45937 - protein, 9 aa, Artificial Sequence
  Peptide Derived from Human Papillomavirus
PFGICKLCL

SEQ ID NO: 45938 - protein, 11 aa, Artificial Sequence
  Peptide Derived from Human Papillomavirus
PFGICKLCLRF

SEQ ID NO: 45939 - protein, 9 aa, Artificial Sequence
  Peptide Derived from Human Papillomavirus
RFHNISGRW

SEQ ID NO: 45940 - protein, 10 aa, Artificial Sequence
  Peptide Derived from Human Papillomavirus
RWAGRCAACW

SEQ ID NO: 45941 - protein, 9 aa, Artificial Sequence
  Peptide Derived from Human Papillomavirus
VYDFAFADL

SEQ ID NO: 45942 - protein, 8 aa, Artificial Sequence
  Peptide Derived from Human Papillomavirus
VYREGNPF

SEQ ID NO: 45943 - protein, 10 aa, Artificial Sequence
  Peptide Derived from Human Papillomavirus
VYREGNPFGI

SEQ ID NO: 45944 - protein, 8 aa, Artificial Sequence
  Peptide Derived from Human Papillomavirus
LYPEPTDL

SEQ ID NO: 45945 - protein, 10 aa, Artificial Sequence
  Peptide Derived from Human Papillomavirus
AMNPDILEDW

SEQ ID NO: 45946 - protein, 9 aa, Artificial Sequence
  Peptide Derived from Human Papillomavirus
DYKQTQLCL

SEQ ID NO: 45947 - protein, 10 aa, Artificial Sequence
  Peptide Derived from Human Papillomavirus
DYKQTQLCLL

SEQ ID NO: 45948 - protein, 8 aa, Artificial Sequence
  Peptide Derived from Human Papillomavirus
EYDLQFVF

SEQ ID NO: 45949 - protein, 10 aa, Artificial Sequence
  Peptide Derived from Human Papillomavirus
EYDLQFVFQL

SEQ ID NO: 45950 - protein, 11 aa, Artificial Sequence
  Peptide Derived from Human Papillomavirus
EYIRHVEEYDL

SEQ ID NO: 45951 - protein, 8 aa, Artificial Sequence
  Peptide Derived from Human Papillomavirus
EYVSRTSI

SEQ ID NO: 45952 - protein, 10 aa, Artificial Sequence
  Peptide Derived from Human Papillomavirus
FFFLRREQMF

SEQ ID NO: 45953 - protein, 9 aa, Artificial Sequence
  Peptide Derived from Human Papillomavirus
FFLRREQMF

SEQ ID NO: 45954 - protein, 8 aa, Artificial Sequence
  Peptide Derived from Human Papillomavirus
FFNRAGTL

SEQ ID NO: 45955 - protein, 10 aa, Artificial Sequence
  Peptide Derived from Human Papillomavirus
FWEVDLKEKF

SEQ ID NO: 45956 - protein, 9 aa, Artificial Sequence
  Peptide Derived from Human Papillomavirus
FYNPDTQRL

SEQ ID NO: 45957 - protein, 11 aa, Artificial Sequence
  Peptide Derived from Human Papillomavirus
FYNPDTQRLVW

SEQ ID NO: 45958 - protein, 10 aa, Artificial Sequence
  Peptide Derived from Human Papillomavirus
GFGCMDFKTL

SEQ ID NO: 45959 - protein, 9 aa, Artificial Sequence
  Peptide Derived from Human Papillomavirus
HFFNRAGTL

SEQ ID NO: 45960 - protein, 10 aa, Artificial Sequence
  Peptide Derived from Human Papillomavirus
IYYYAGSSRL

SEQ ID NO: 45961 - protein, 11 aa, Artificial Sequence
  Peptide Derived from Human Papillomavirus
IYYYAGSSRLL

SEQ ID NO: 45962 - protein, 9 aa, Artificial Sequence
  Peptide Derived from Human Papillomavirus
KFGFPDTSF

SEQ ID NO: 45963 - protein, 8 aa, Artificial Sequence
  Peptide Derived from Human Papillomavirus
KFLLQAGL

SEQ ID NO: 45964 - protein, 9 aa, Artificial Sequence
  Peptide Derived from Human Papillomavirus
KFSADLDQF

SEQ ID NO: 45965 - protein, 11 aa, Artificial Sequence
  Peptide Derived from Human Papillomavirus
KFSADLDQFPL

SEQ ID NO: 45966 - protein, 11 aa, Artificial Sequence
  Peptide Derived from Human Papillomavirus
KMTSEPYGDSL

SEQ ID NO: 45967 - protein, 9 aa, Artificial Sequence
  Peptide Derived from Human Papillomavirus
KYTFWEVDL

SEQ ID NO: 45968 - protein, 11 aa, Artificial Sequence
  Peptide Derived from Human Papillomavirus
LFFFLRREQMF

SEQ ID NO: 45969 - protein, 8 aa, Artificial Sequence
  Peptide Derived from Human Papillomavirus
LFNKPYWL

SEQ ID NO: 45970 - protein, 8 aa, Artificial Sequence
  Peptide Derived from Human Papillomavirus
PYGDSLFF

SEQ ID NO: 45971 - protein, 9 aa, Artificial Sequence
  Peptide Derived from Human Papillomavirus
PYGDSLFFF

SEQ ID NO: 45972 - protein, 10 aa, Artificial Sequence
  Peptide Derived from Human Papillomavirus
PYGDSLFFFL

SEQ ID NO: 45973 - protein, 8 aa, Artificial Sequence
  Peptide Derived from Human Papillomavirus
QFPLGRKF

SEQ ID NO: 45974 - protein, 9 aa, Artificial Sequence
  Peptide Derived from Human Papillomavirus
QFPLGRKFL

SEQ ID NO: 45975 - protein, 10 aa, Artificial Sequence
  Peptide Derived from Human Papillomavirus
QFPLGRKFLL

SEQ ID NO: 45976 - protein, 11 aa, Artificial Sequence
  Peptide Derived from Human Papillomavirus
QFVFQLCKVTL

SEQ ID NO: 45977 - protein, 8 aa, Artificial Sequence
  Peptide Derived from Human Papillomavirus
QMFVRHFF

SEQ ID NO: 45978 - protein, 9 aa, Artificial Sequence
  Peptide Derived from Human Papillomavirus
QYRVFRVRL

SEQ ID NO: 45979 - protein, 8 aa, Artificial Sequence
  Peptide Derived from Human Papillomavirus
RFVTSQAI

SEQ ID NO: 45980 - protein, 10 aa, Artificial Sequence
  Peptide Derived from Human Papillomavirus
SFYNPDTQRL

SEQ ID NO: 45981 - protein, 9 aa, Artificial Sequence
  Peptide Derived from Human Papillomavirus
SMDYKQTQL

SEQ ID NO: 45982 - protein, 11 aa, Artificial Sequence
  Peptide Derived from Human Papillomavirus
SMDYKQTQLCL

SEQ ID NO: 45983 - protein, 9 aa, Artificial Sequence
  Peptide Derived from Human Papillomavirus
SMVTSESQL

SEQ ID NO: 45984 - protein, 10 aa, Artificial Sequence
  Peptide Derived from Human Papillomavirus
SMVTSESQLF

SEQ ID NO: 45985 - protein, 11 aa, Artificial Sequence
  Peptide Derived from Human Papillomavirus
TFWEVDLKEKF

SEQ ID NO: 45986 - protein, 10 aa, Artificial Sequence
  Peptide Derived from Human Papillomavirus
TYIHAMNPDI

SEQ ID NO: 45987 - protein, 11 aa, Artificial Sequence
  Peptide Derived from Human Papillomavirus
TYIHAMNPDIL

SEQ ID NO: 45988 - protein, 11 aa, Artificial Sequence
  Peptide Derived from Human Papillomavirus
TYKNENFKEYI

SEQ ID NO: 45989 - protein, 10 aa, Artificial Sequence
  Peptide Derived from Human Papillomavirus
TYRFVTSQAI

SEQ ID NO: 45990 - protein, 9 aa, Artificial Sequence
  Peptide Derived from Human Papillomavirus
VFQLCKVTL

SEQ ID NO: 45991 - protein, 9 aa, Artificial Sequence
  Peptide Derived from Human Papillomavirus
VWACVGLEI

SEQ ID NO: 45992 - protein, 11 aa, Artificial Sequence
  Peptide Derived from Human Papillomavirus
VWRPSEATVYL

SEQ ID NO: 45993 - protein, 8 aa, Artificial Sequence
  Peptide Derived from Human Papillomavirus
YYAGSSRL

SEQ ID NO: 45994 - protein, 9 aa, Artificial Sequence
  Peptide Derived from Human Papillomavirus
YYAGSSRLL

SEQ ID NO: 45995 - protein, 9 aa, Artificial Sequence
  Peptide Derived from Human Papillomavirus
YYYAGSSRL

SEQ ID NO: 45996 - protein, 10 aa, Artificial Sequence
  Peptide Derived from Human Papillomavirus
YYYAGSSRLL

SEQ ID NO: 45997 - protein, 11 aa, Artificial Sequence
  Peptide Derived from Human Papillomavirus
AFESFDPEDTL

SEQ ID NO: 45998 - protein, 9 aa, Artificial Sequence
  Peptide Derived from Human Papillomavirus
AFLTSPHKL

SEQ ID NO: 45999 - protein, 10 aa, Artificial Sequence
  Peptide Derived from Human Papillomavirus
AFLTSPHKLI

SEQ ID NO: 46000 - protein, 8 aa, Artificial Sequence
  Peptide Derived from Human Papillomavirus
DFLDIIAL

SEQ ID NO: 46001 - protein, 9 aa, Artificial Sequence
  Peptide Derived from Human Papillomavirus
DFVLHPSYF

SEQ ID NO: 46002 - protein, 10 aa, Artificial Sequence
  Peptide Derived from Human Papillomavirus
DFVLHPSYFI

SEQ ID NO: 46003 - protein, 11 aa, Artificial Sequence
  Peptide Derived from Human Papillomavirus
DFVLHPSYFIL

SEQ ID NO: 46004 - protein, 9 aa, Artificial Sequence
  Peptide Derived from Human Papillomavirus
HYYQDLSPI

SEQ ID NO: 46005 - protein, 8 aa, Artificial Sequence
  Peptide Derived from Human Papillomavirus
KYGSLGVF

SEQ ID NO: 46006 - protein, 9 aa, Artificial Sequence
  Peptide Derived from Human Papillomavirus
KYGSLGVFF

SEQ ID NO: 46007 - protein, 8 aa, Artificial Sequence
  Peptide Derived from Human Papillomavirus
LFPTSSPF

SEQ ID NO: 46008 - protein, 11 aa, Artificial Sequence
  Peptide Derived from Human Papillomavirus
LFPTSSPFVPI

SEQ ID NO: 46009 - protein, 8 aa, Artificial Sequence
  Peptide Derived from Human Papillomavirus
PFFPFDTI

SEQ ID NO: 46010 - protein, 8 aa, Artificial Sequence
  Peptide Derived from Human Papillomavirus
PFVPISPF

SEQ ID NO: 46011 - protein, 9 aa, Artificial Sequence
  Peptide Derived from Human Papillomavirus
PFVPISPFF

SEQ ID NO: 46012 - protein, 11 aa, Artificial Sequence
  Peptide Derived from Human Papillomavirus
PFVPISPFFPF

SEQ ID NO: 46013 - protein, 9 aa, Artificial Sequence
  Peptide Derived from Human Papillomavirus
PMQHSYSTF

SEQ ID NO: 46014 - protein, 11 aa, Artificial Sequence
  Peptide Derived from Human Papillomavirus
RFSRVGQKATL

SEQ ID NO: 46015 - protein, 8 aa, Artificial Sequence
  Peptide Derived from Human Papillomavirus
SFDPEDTL

SEQ ID NO: 46016 - protein, 10 aa, Artificial Sequence
  Peptide Derived from Human Papillomavirus
SFDPEDTLQF

SEQ ID NO: 46017 - protein, 10 aa, Artificial Sequence
  Peptide Derived from Human Papillomavirus
SYENIPMDTF

SEQ ID NO: 46018 - protein, 8 aa, Artificial Sequence
  Peptide Derived from Human Papillomavirus
SYSINDGL

SEQ ID NO: 46019 - protein, 8 aa, Artificial Sequence
  Peptide Derived from Human Papillomavirus
TFTEPSVL

SEQ ID NO: 46020 - protein, 10 aa, Artificial Sequence
  Peptide Derived from Human Papillomavirus
TYDNPAFESF

SEQ ID NO: 46021 - protein, 8 aa, Artificial Sequence
  Peptide Derived from Human Papillomavirus
VFFGGLGI

SEQ ID NO: 46022 - protein, 11 aa, Artificial Sequence
  Peptide Derived from Human Papillomavirus
VMSGPDIPSPL

SEQ ID NO: 46023 - protein, 11 aa, Artificial Sequence
  Peptide Derived from Human Papillomavirus
YFILRRRRKRF

SEQ ID NO: 46024 - protein, 8 aa, Artificial Sequence
  Peptide Derived from Human Papillomavirus
YYQDLSPI

SEQ ID NO: 46025 - protein, 11 aa, Artificial Sequence
  Peptide Derived from Human Papillomavirus
YYQDLSPIVPL

SEQ ID NO: 46026 - protein, 9 aa, Artificial Sequence
  Peptide Derived from Human Papillomavirus
AMLAVFKDI

SEQ ID NO: 46027 - protein, 11 aa, Artificial Sequence
  Peptide Derived from Human Papillomavirus
AMLDDATHTCW

SEQ ID NO: 46028 - protein, 10 aa, Artificial Sequence
  Peptide Derived from Human Papillomavirus
CFFERTWSRL

SEQ ID NO: 46029 - protein, 9 aa, Artificial Sequence
  Peptide Derived from Human Papillomavirus
CMLIEPPKL

SEQ ID NO: 46030 - protein, 9 aa, Artificial Sequence
  Peptide Derived from Human Papillomavirus
DFIDTQLSI

SEQ ID NO: 46031 - protein, 9 aa, Artificial Sequence
  Peptide Derived from Human Papillomavirus
DMAFQYAQL

SEQ ID NO: 46032 - protein, 10 aa, Artificial Sequence
  Peptide Derived from Human Papillomavirus
DMVDFIDTQL

SEQ ID NO: 46033 - protein, 11 aa, Artificial Sequence
  Peptide Derived from Human Papillomavirus
DMVQWAFDNDL

SEQ ID NO: 46034 - protein, 8 aa, Artificial Sequence
  Peptide Derived from Human Papillomavirus
DWRPIVQF

SEQ ID NO: 46035 - protein, 9 aa, Artificial Sequence
  Peptide Derived from Human Papillomavirus
DWRPIVQFL

SEQ ID NO: 46036 - protein, 9 aa, Artificial Sequence
  Peptide Derived from Human Papillomavirus
EFISFLRAL

SEQ ID NO: 46037 - protein, 8 aa, Artificial Sequence
  Peptide Derived from Human Papillomavirus
EWIQRLTI

SEQ ID NO: 46038 - protein, 9 aa, Artificial Sequence
  Peptide Derived from Human Papillomavirus
EWIQRLTII

SEQ ID NO: 46039 - protein, 9 aa, Artificial Sequence
  Peptide Derived from Human Papillomavirus
FFERTWSRL

SEQ ID NO: 46040 - protein, 11 aa, Artificial Sequence
  Peptide Derived from Human Papillomavirus
FFERTWSRLDL

SEQ ID NO: 46041 - protein, 11 aa, Artificial Sequence
  Peptide Derived from Human Papillomavirus
GFKTLIKPATL

SEQ ID NO: 46042 - protein, 8 aa, Artificial Sequence
  Peptide Derived from Human Papillomavirus
GMSFIHFL

SEQ ID NO: 46043 - protein, 8 aa, Artificial Sequence
  Peptide Derived from Human Papillomavirus
GWFFVETI

SEQ ID NO: 46044 - protein, 8 aa, Artificial Sequence
  Peptide Derived from Human Papillomavirus
HFLQGAII

SEQ ID NO: 46045 - protein, 10 aa, Artificial Sequence
  Peptide Derived from Human Papillomavirus
HFLQGAIISF

SEQ ID NO: 46046 - protein, 9 aa, Artificial Sequence
  Peptide Derived from Human Papillomavirus
IYGLSFTDL

SEQ ID NO: 46047 - protein, 9 aa, Artificial Sequence
  Peptide Derived from Human Papillomavirus
KWGVLILAL

SEQ ID NO: 46048 - protein, 10 aa, Artificial Sequence
  Peptide Derived from Human Papillomavirus
KWGVLILALL

SEQ ID NO: 46049 - protein, 8 aa, Artificial Sequence
  Peptide Derived from Human Papillomavirus
LYAHIQCL

SEQ ID NO: 46050 - protein, 8 aa, Artificial Sequence
  Peptide Derived from Human Papillomavirus
LYWYRTGI

SEQ ID NO: 46051 - protein, 11 aa, Artificial Sequence
  Peptide Derived from Human Papillomavirus
LYWYRTGISNI

SEQ ID NO: 46052 - protein, 10 aa, Artificial Sequence
  Peptide Derived from Human Papillomavirus
NFDLSDMVQW

SEQ ID NO: 46053 - protein, 10 aa, Artificial Sequence
  Peptide Derived from Human Papillomavirus
NWKCFFERTW

SEQ ID NO: 46054 - protein, 10 aa, Artificial Sequence
  Peptide Derived from Human Papillomavirus
PYLESRVTVF

SEQ ID NO: 46055 - protein, 10 aa, Artificial Sequence
  Peptide Derived from Human Papillomavirus
QFLRYQGVEF

SEQ ID NO: 46056 - protein, 11 aa, Artificial Sequence
  Peptide Derived from Human Papillomavirus
QFLRYQGVEFI

SEQ ID NO: 46057 - protein, 8 aa, Artificial Sequence
  Peptide Derived from Human Papillomavirus
QMNMSQWI

SEQ ID NO: 46058 - protein, 8 aa, Artificial Sequence
  Peptide Derived from Human Papillomavirus
QWAFDNDL

SEQ ID NO: 46059 - protein, 10 aa, Artificial Sequence
  Peptide Derived from Human Papillomavirus
QWIKYRCSKI

SEQ ID NO: 46060 - protein, 9 aa, Artificial Sequence
  Peptide Derived from Human Papillomavirus
RYKCGKNRL

SEQ ID NO: 46061 - protein, 8 aa, Artificial Sequence
  Peptide Derived from Human Papillomavirus
RYQGVEFI

SEQ ID NO: 46062 - protein, 10 aa, Artificial Sequence
  Peptide Derived from Human Papillomavirus
RYQGVEFISF

SEQ ID NO: 46063 - protein, 11 aa, Artificial Sequence
  Peptide Derived from Human Papillomavirus
RYQGVEFISFL

SEQ ID NO: 46064 - protein, 10 aa, Artificial Sequence
  Peptide Derived from Human Papillomavirus
SFIHFLQGAI

SEQ ID NO: 46065 - protein, 11 aa, Artificial Sequence
  Peptide Derived from Human Papillomavirus
SFIHFLQGAII

SEQ ID NO: 46066 - protein, 9 aa, Artificial Sequence
  Peptide Derived from Human Papillomavirus
SFLRALKEF

SEQ ID NO: 46067 - protein, 10 aa, Artificial Sequence
  Peptide Derived from Human Papillomavirus
SFLRALKEFL

SEQ ID NO: 46068 - protein, 9 aa, Artificial Sequence
  Peptide Derived from Human Papillomavirus
SFTDLVRNF

SEQ ID NO: 46069 - protein, 9 aa, Artificial Sequence
  Peptide Derived from Human Papillomavirus
SFVNSNSHF

SEQ ID NO: 46070 - protein, 10 aa, Artificial Sequence
  Peptide Derived from Human Papillomavirus
SFVNSNSHFW

SEQ ID NO: 46071 - protein, 11 aa, Artificial Sequence
  Peptide Derived from Human Papillomavirus
SFVNSNSHFWL

SEQ ID NO: 46072 - protein, 8 aa, Artificial Sequence
  Peptide Derived from Human Papillomavirus
SYFGMSFI

SEQ ID NO: 46073 - protein, 10 aa, Artificial Sequence
  Peptide Derived from Human Papillomavirus
SYFGMSFIHF

SEQ ID NO: 46074 - protein, 11 aa, Artificial Sequence
  Peptide Derived from Human Papillomavirus
SYFGMSFIHFL

SEQ ID NO: 46075 - protein, 8 aa, Artificial Sequence
  Peptide Derived from Human Papillomavirus
TFPHAFPF

SEQ ID NO: 46076 - protein, 11 aa, Artificial Sequence
  Peptide Derived from Human Papillomavirus
TYFDNYMRNAL

SEQ ID NO: 46077 - protein, 8 aa, Artificial Sequence
  Peptide Derived from Human Papillomavirus
VFKDIYGL

SEQ ID NO: 46078 - protein, 10 aa, Artificial Sequence
  Peptide Derived from Human Papillomavirus
VFKDIYGLSF

SEQ ID NO: 46079 - protein, 8 aa, Artificial Sequence
  Peptide Derived from Human Papillomavirus
VFTFPHAF

SEQ ID NO: 46080 - protein, 10 aa, Artificial Sequence
  Peptide Derived from Human Papillomavirus
VFTFPHAFPF

SEQ ID NO: 46081 - protein, 9 aa, Artificial Sequence
  Peptide Derived from Human Papillomavirus
VYEINDKNW

SEQ ID NO: 46082 - protein, 9 aa, Artificial Sequence
  Peptide Derived from Human Papillomavirus
WYRTGISNI

SEQ ID NO: 46083 - protein, 10 aa, Artificial Sequence
  Peptide Derived from Human Papillomavirus
YFDNYMRNAL

SEQ ID NO: 46084 - protein, 9 aa, Artificial Sequence
  Peptide Derived from Human Papillomavirus
YFGMSFIHF

SEQ ID NO: 46085 - protein, 10 aa, Artificial Sequence
  Peptide Derived from Human Papillomavirus
YFGMSFIHFL

SEQ ID NO: 46086 - protein, 11 aa, Artificial Sequence
  Peptide Derived from Human Papillomavirus
YMRNALDGNPI

SEQ ID NO: 46087 - protein, 10 aa, Artificial Sequence
  Peptide Derived from Human Papillomavirus
YWYRTGISNI

SEQ ID NO: 46088 - protein, 10 aa, Artificial Sequence
  Peptide Derived from Human Papillomavirus
CMNYVVWDSI

SEQ ID NO: 46089 - protein, 11 aa, Artificial Sequence
  Peptide Derived from Human Papillomavirus
EWTLQDTCEEL

SEQ ID NO: 46090 - protein, 11 aa, Artificial Sequence
  Peptide Derived from Human Papillomavirus
HWTGCNKNTGI

SEQ ID NO: 46091 - protein, 9 aa, Artificial Sequence
  Peptide Derived from Human Papillomavirus
HYENDSKDI

SEQ ID NO: 46092 - protein, 9 aa, Artificial Sequence
  Peptide Derived from Human Papillomavirus
HYSEISSTW

SEQ ID NO: 46093 - protein, 11 aa, Artificial Sequence
  Peptide Derived from Human Papillomavirus
HYSEISSTWHW

SEQ ID NO: 46094 - protein, 9 aa, Artificial Sequence
  Peptide Derived from Human Papillomavirus
IYYITETGI

SEQ ID NO: 46095 - protein, 10 aa, Artificial Sequence
  Peptide Derived from Human Papillomavirus
IYYITETGIW

SEQ ID NO: 46096 - protein, 9 aa, Artificial Sequence
  Peptide Derived from Human Papillomavirus
KMQTPKESL

SEQ ID NO: 46097 - protein, 9 aa, Artificial Sequence
  Peptide Derived from Human Papillomavirus
KYADHYSEI

SEQ ID NO: 46098 - protein, 8 aa, Artificial Sequence
  Peptide Derived from Human Papillomavirus
KYGNSNTW

SEQ ID NO: 46099 - protein, 9 aa, Artificial Sequence
  Peptide Derived from Human Papillomavirus
KYNNEEWTL

SEQ ID NO: 46100 - protein, 9 aa, Artificial Sequence
  Peptide Derived from Human Papillomavirus
LFTAREHGI

SEQ ID NO: 46101 - protein, 10 aa, Artificial Sequence
  Peptide Derived from Human Papillomavirus
LWNTEPSQCF

SEQ ID NO: 46102 - protein, 8 aa, Artificial Sequence
  Peptide Derived from Human Papillomavirus
NYVVWDSI

SEQ ID NO: 46103 - protein, 11 aa, Artificial Sequence
  Peptide Derived from Human Papillomavirus
NYVVWDSIYYI

SEQ ID NO: 46104 - protein, 8 aa, Artificial Sequence
  Peptide Derived from Human Papillomavirus
SYWGVYYI

SEQ ID NO: 46105 - protein, 8 aa, Artificial Sequence
  Peptide Derived from Human Papillomavirus
SYWQLIRL

SEQ ID NO: 46106 - protein, 8 aa, Artificial Sequence
  Peptide Derived from Human Papillomavirus
TFLDVVTI

SEQ ID NO: 46107 - protein, 11 aa, Artificial Sequence
  Peptide Derived from Human Papillomavirus
TWEVQYGGNVI

SEQ ID NO: 46108 - protein, 11 aa, Artificial Sequence
  Peptide Derived from Human Papillomavirus
TYNSEVQRNTF

SEQ ID NO: 46109 - protein, 8 aa, Artificial Sequence
  Peptide Derived from Human Papillomavirus
VWDSIYYI

SEQ ID NO: 46110 - protein, 11 aa, Artificial Sequence
  Peptide Derived from Human Papillomavirus
YWQLIRLENAI

SEQ ID NO: 46111 - protein, 8 aa, Artificial Sequence
  Peptide Derived from Human Papillomavirus
YYITETGI

SEQ ID NO: 46112 - protein, 9 aa, Artificial Sequence
  Peptide Derived from Human Papillomavirus
YYITETGIW

SEQ ID NO: 46113 - protein, 9 aa, Artificial Sequence
  Peptide Derived from Human Papillomavirus
AYAACHKCI

SEQ ID NO: 46114 - protein, 11 aa, Artificial Sequence
  Peptide Derived from Human Papillomavirus
AYAACHKCIDF

SEQ ID NO: 46115 - protein, 9 aa, Artificial Sequence
  Peptide Derived from Human Papillomavirus
DFYSRIREL

SEQ ID NO: 46116 - protein, 8 aa, Artificial Sequence
  Peptide Derived from Human Papillomavirus
FYSRIREL

SEQ ID NO: 46117 - protein, 9 aa, Artificial Sequence
  Peptide Derived from Human Papillomavirus
LFIVYRDCI

SEQ ID NO: 46118 - protein, 9 aa, Artificial Sequence
  Peptide Derived from Human Papillomavirus
LYNLLIRCL

SEQ ID NO: 46119 - protein, 11 aa, Artificial Sequence
  Peptide Derived from Human Papillomavirus
PYKLPDLCTEL

SEQ ID NO: 46120 - protein, 8 aa, Artificial Sequence
  Peptide Derived from Human Papillomavirus
QFAFKDLF

SEQ ID NO: 46121 - protein, 9 aa, Artificial Sequence
  Peptide Derived from Human Papillomavirus
QFAFKDLFI

SEQ ID NO: 46122 - protein, 9 aa, Artificial Sequence
  Peptide Derived from Human Papillomavirus
VYGETLEKI

SEQ ID NO: 46123 - protein, 9 aa, Artificial Sequence
  Peptide Derived from Human Papillomavirus
VYQFAFKDL

SEQ ID NO: 46124 - protein, 10 aa, Artificial Sequence
  Peptide Derived from Human Papillomavirus
VYQFAFKDLF

SEQ ID NO: 46125 - protein, 11 aa, Artificial Sequence
  Peptide Derived from Human Papillomavirus
VYQFAFKDLFI

SEQ ID NO: 46126 - protein, 11 aa, Artificial Sequence
  Peptide Derived from Human Papillomavirus
YYSNSVYGETL

SEQ ID NO: 46127 - protein, 8 aa, Artificial Sequence
  Peptide Derived from Human Papillomavirus
LFLSTLSF

SEQ ID NO: 46128 - protein, 11 aa, Artificial Sequence
  Peptide Derived from Human Papillomavirus
AYQYRVFRVAL

SEQ ID NO: 46129 - protein, 9 aa, Artificial Sequence
  Peptide Derived from Human Papillomavirus
DYKQTQLCI

SEQ ID NO: 46130 - protein, 10 aa, Artificial Sequence
  Peptide Derived from Human Papillomavirus
DYKQTQLCIL

SEQ ID NO: 46131 - protein, 8 aa, Artificial Sequence
  Peptide Derived from Human Papillomavirus
DYVSRTSI

SEQ ID NO: 46132 - protein, 9 aa, Artificial Sequence
  Peptide Derived from Human Papillomavirus
DYVSRTSIF

SEQ ID NO: 46133 - protein, 8 aa, Artificial Sequence
  Peptide Derived from Human Papillomavirus
EYDLQFIF

SEQ ID NO: 46134 - protein, 10 aa, Artificial Sequence
  Peptide Derived from Human Papillomavirus
EYDLQFIFQL

SEQ ID NO: 46135 - protein, 9 aa, Artificial Sequence
  Peptide Derived from Human Papillomavirus
FFCLRREQL

SEQ ID NO: 46136 - protein, 10 aa, Artificial Sequence
  Peptide Derived from Human Papillomavirus
FFCLRREQLF

SEQ ID NO: 46137 - protein, 10 aa, Artificial Sequence
  Peptide Derived from Human Papillomavirus
FWTVDLKEKF

SEQ ID NO: 46138 - protein, 9 aa, Artificial Sequence
  Peptide Derived from Human Papillomavirus
FYHAGSSRL

SEQ ID NO: 46139 - protein, 10 aa, Artificial Sequence
  Peptide Derived from Human Papillomavirus
FYHAGSSRLL

SEQ ID NO: 46140 - protein, 10 aa, Artificial Sequence
  Peptide Derived from Human Papillomavirus
GMEIGRGQPL

SEQ ID NO: 46141 - protein, 10 aa, Artificial Sequence
  Peptide Derived from Human Papillomavirus
GYGAMDFSTL

SEQ ID NO: 46142 - protein, 11 aa, Artificial Sequence
  Peptide Derived from Human Papillomavirus
HYSRHVEEYDL

SEQ ID NO: 46143 - protein, 9 aa, Artificial Sequence
  Peptide Derived from Human Papillomavirus
IFLKNVNVF

SEQ ID NO: 46144 - protein, 11 aa, Artificial Sequence
  Peptide Derived from Human Papillomavirus
IFLKNVNVFPI

SEQ ID NO: 46145 - protein, 8 aa, Artificial Sequence
  Peptide Derived from Human Papillomavirus
IFLQMALW

SEQ ID NO: 46146 - protein, 9 aa, Artificial Sequence
  Peptide Derived from Human Papillomavirus
IFQLCTITL

SEQ ID NO: 46147 - protein, 10 aa, Artificial Sequence
  Peptide Derived from Human Papillomavirus
IFYHAGSSRL

SEQ ID NO: 46148 - protein, 11 aa, Artificial Sequence
  Peptide Derived from Human Papillomavirus
IFYHAGSSRLL

SEQ ID NO: 46149 - protein, 8 aa, Artificial Sequence
  Peptide Derived from Human Papillomavirus
IYGHGIII

SEQ ID NO: 46150 - protein, 9 aa, Artificial Sequence
  Peptide Derived from Human Papillomavirus
IYGHGIIIF

SEQ ID NO: 46151 - protein, 10 aa, Artificial Sequence
  Peptide Derived from Human Papillomavirus
IYGHGIIIFL

SEQ ID NO: 46152 - protein, 9 aa, Artificial Sequence
  Peptide Derived from Human Papillomavirus
IYNPETQRL

SEQ ID NO: 46153 - protein, 11 aa, Artificial Sequence
  Peptide Derived from Human Papillomavirus
IYNPETQRLVW

SEQ ID NO: 46154 - protein, 9 aa, Artificial Sequence
  Peptide Derived from Human Papillomavirus
KFGLPDSTI

SEQ ID NO: 46155 - protein, 8 aa, Artificial Sequence
  Peptide Derived from Human Papillomavirus
KFLVQAGL

SEQ ID NO: 46156 - protein, 11 aa, Artificial Sequence
  Peptide Derived from Human Papillomavirus
KFSSDLDQYPL

SEQ ID NO: 46157 - protein, 11 aa, Artificial Sequence
  Peptide Derived from Human Papillomavirus
KFWTVDLKEKF

SEQ ID NO: 46158 - protein, 8 aa, Artificial Sequence
  Peptide Derived from Human Papillomavirus
LFNKPYWL

SEQ ID NO: 46159 - protein, 11 aa, Artificial Sequence
  Peptide Derived from Human Papillomavirus
LWRPSDSTVYL

SEQ ID NO: 46160 - protein, 10 aa, Artificial Sequence
  Peptide Derived from Human Papillomavirus
MFFCLRREQL

SEQ ID NO: 46161 - protein, 11 aa, Artificial Sequence
  Peptide Derived from Human Papillomavirus
MFFCLRREQLF

SEQ ID NO: 46162 - protein, 8 aa, Artificial Sequence
  Peptide Derived from Human Papillomavirus
PYDKLKFW

SEQ ID NO: 46163 - protein, 8 aa, Artificial Sequence
  Peptide Derived from Human Papillomavirus
PYGDSMFF

SEQ ID NO: 46164 - protein, 10 aa, Artificial Sequence
  Peptide Derived from Human Papillomavirus
PYGDSMFFCL

SEQ ID NO: 46165 - protein, 9 aa, Artificial Sequence
  Peptide Derived from Human Papillomavirus
QFIFQLCTI

SEQ ID NO: 46166 - protein, 11 aa, Artificial Sequence
  Peptide Derived from Human Papillomavirus
QFIFQLCTITL

SEQ ID NO: 46167 - protein, 8 aa, Artificial Sequence
  Peptide Derived from Human Papillomavirus
QYPLGRKF

SEQ ID NO: 46168 - protein, 9 aa, Artificial Sequence
  Peptide Derived from Human Papillomavirus
QYPLGRKFL

SEQ ID NO: 46169 - protein, 9 aa, Artificial Sequence
  Peptide Derived from Human Papillomavirus
QYRVFRVAL

SEQ ID NO: 46170 - protein, 11 aa, Artificial Sequence
  Peptide Derived from Human Papillomavirus
SMFFCLRREQL

SEQ ID NO: 46171 - protein, 10 aa, Artificial Sequence
  Peptide Derived from Human Papillomavirus
SMNSSILENW

SEQ ID NO: 46172 - protein, 10 aa, Artificial Sequence
  Peptide Derived from Human Papillomavirus
SYIHSMNSSI

SEQ ID NO: 46173 - protein, 11 aa, Artificial Sequence
  Peptide Derived from Human Papillomavirus
SYIHSMNSSIL

SEQ ID NO: 46174 - protein, 10 aa, Artificial Sequence
  Peptide Derived from Human Papillomavirus
VFPIFLQMAL

SEQ ID NO: 46175 - protein, 11 aa, Artificial Sequence
  Peptide Derived from Human Papillomavirus
VFPIFLQMALW

SEQ ID NO: 46176 - protein, 10 aa, Artificial Sequence
  Peptide Derived from Human Papillomavirus
VMGDTVPTDL

SEQ ID NO: 46177 - protein, 9 aa, Artificial Sequence
  Peptide Derived from Human Papillomavirus
VWACVGMEI

SEQ ID NO: 46178 - protein, 10 aa, Artificial Sequence
  Peptide Derived from Human Papillomavirus
VYSPSPSGSI

SEQ ID NO: 46179 - protein, 8 aa, Artificial Sequence
  Peptide Derived from Human Papillomavirus
AFSDPSII

SEQ ID NO: 46180 - protein, 9 aa, Artificial Sequence
  Peptide Derived from Human Papillomavirus
AYEPLDTTL

SEQ ID NO: 46181 - protein, 11 aa, Artificial Sequence
  Peptide Derived from Human Papillomavirus
AYEPLDTTLSF

SEQ ID NO: 46182 - protein, 8 aa, Artificial Sequence
  Peptide Derived from Human Papillomavirus
DFMDIIRL

SEQ ID NO: 46183 - protein, 8 aa, Artificial Sequence
  Peptide Derived from Human Papillomavirus
FYHDISPI

SEQ ID NO: 46184 - protein, 10 aa, Artificial Sequence
  Peptide Derived from Human Papillomavirus
GYEEIPLQTF

SEQ ID NO: 46185 - protein, 9 aa, Artificial Sequence
  Peptide Derived from Human Papillomavirus
HFYHDISPI

SEQ ID NO: 46186 - protein, 8 aa, Artificial Sequence
  Peptide Derived from Human Papillomavirus
IFLGGLGI

SEQ ID NO: 46187 - protein, 8 aa, Artificial Sequence
  Peptide Derived from Human Papillomavirus
IYTGPDII

SEQ ID NO: 46188 - protein, 9 aa, Artificial Sequence
  Peptide Derived from Human Papillomavirus
IYTGPDIIL

SEQ ID NO: 46189 - protein, 8 aa, Artificial Sequence
  Peptide Derived from Human Papillomavirus
LFDVYADF

SEQ ID NO: 46190 - protein, 8 aa, Artificial Sequence
  Peptide Derived from Human Papillomavirus
LWPWYYYF

SEQ ID NO: 46191 - protein, 9 aa, Artificial Sequence
  Peptide Derived from Human Papillomavirus
MFTRSGKQI

SEQ ID NO: 46192 - protein, 8 aa, Artificial Sequence
  Peptide Derived from Human Papillomavirus
PYFFADGF

SEQ ID NO: 46193 - protein, 9 aa, Artificial Sequence
  Peptide Derived from Human Papillomavirus
QFLTHPSSL

SEQ ID NO: 46194 - protein, 8 aa, Artificial Sequence
  Peptide Derived from Human Papillomavirus
QWSSLGIF

SEQ ID NO: 46195 - protein, 9 aa, Artificial Sequence
  Peptide Derived from Human Papillomavirus
QWSSLGIFL

SEQ ID NO: 46196 - protein, 11 aa, Artificial Sequence
  Peptide Derived from Human Papillomavirus
QYYLWPWYYYF

SEQ ID NO: 46197 - protein, 9 aa, Artificial Sequence
  Peptide Derived from Human Papillomavirus
SFTYPKYSL

SEQ ID NO: 46198 - protein, 9 aa, Artificial Sequence
  Peptide Derived from Human Papillomavirus
SYSNVTVPL

SEQ ID NO: 46199 - protein, 10 aa, Artificial Sequence
  Peptide Derived from Human Papillomavirus
TFDNPAYEPL

SEQ ID NO: 46200 - protein, 8 aa, Artificial Sequence
  Peptide Derived from Human Papillomavirus
TFTGTSGF

SEQ ID NO: 46201 - protein, 10 aa, Artificial Sequence
  Peptide Derived from Human Papillomavirus
TFTGTSGFEI

SEQ ID NO: 46202 - protein, 10 aa, Artificial Sequence
  Peptide Derived from Human Papillomavirus
TMFTRSGKQI

SEQ ID NO: 46203 - protein, 9 aa, Artificial Sequence
  Peptide Derived from Human Papillomavirus
YFPKKRKRI

SEQ ID NO: 46204 - protein, 10 aa, Artificial Sequence
  Peptide Derived from Human Papillomavirus
YYFPKKRKRI

SEQ ID NO: 46205 - protein, 10 aa, Artificial Sequence
  Peptide Derived from Human Papillomavirus
YYLWPWYYYF

SEQ ID NO: 46206 - protein, 11 aa, Artificial Sequence
  Peptide Derived from Human Papillomavirus
YYYFPKKRKRI

SEQ ID NO: 46207 - protein, 9 aa, Artificial Sequence
  Peptide Derived from Human Papillomavirus
CFKKEGQHI

SEQ ID NO: 46208 - protein, 10 aa, Artificial Sequence
  Peptide Derived from Human Papillomavirus
CMQYVAWKYI

SEQ ID NO: 46209 - protein, 9 aa, Artificial Sequence
  Peptide Derived from Human Papillomavirus
DFEQEAKKF

SEQ ID NO: 46210 - protein, 11 aa, Artificial Sequence
  Peptide Derived from Human Papillomavirus
EWTLRDTCEEL

SEQ ID NO: 46211 - protein, 11 aa, Artificial Sequence
  Peptide Derived from Human Papillomavirus
IWEVHMENESI

SEQ ID NO: 46212 - protein, 11 aa, Artificial Sequence
  Peptide Derived from Human Papillomavirus
IYKDETQRNSF

SEQ ID NO: 46213 - protein, 9 aa, Artificial Sequence
  Peptide Derived from Human Papillomavirus
IYNNEEWTL

SEQ ID NO: 46214 - protein, 9 aa, Artificial Sequence
  Peptide Derived from Human Papillomavirus
IYYNGDCGW

SEQ ID NO: 46215 - protein, 8 aa, Artificial Sequence
  Peptide Derived from Human Papillomavirus
KFGCKNIW

SEQ ID NO: 46216 - protein, 11 aa, Artificial Sequence
  Peptide Derived from Human Papillomavirus
KYIYYNGDCGW

SEQ ID NO: 46217 - protein, 11 aa, Artificial Sequence
  Peptide Derived from Human Papillomavirus
LFVDVTSTYHW

SEQ ID NO: 46218 - protein, 10 aa, Artificial Sequence
  Peptide Derived from Human Papillomavirus
LWLTEPKKCF

SEQ ID NO: 46219 - protein, 8 aa, Artificial Sequence
  Peptide Derived from Human Papillomavirus
NYSIITII

SEQ ID NO: 46220 - protein, 8 aa, Artificial Sequence
  Peptide Derived from Human Papillomavirus
QYVAWKYI

SEQ ID NO: 46221 - protein, 8 aa, Artificial Sequence
  Peptide Derived from Human Papillomavirus
RFQKYKTL

SEQ ID NO: 46222 - protein, 9 aa, Artificial Sequence
  Peptide Derived from Human Papillomavirus
RFQKYKTLF

SEQ ID NO: 46223 - protein, 10 aa, Artificial Sequence
  Peptide Derived from Human Papillomavirus
RYRFQKYKTL

SEQ ID NO: 46224 - protein, 11 aa, Artificial Sequence
  Peptide Derived from Human Papillomavirus
RYRFQKYKTLF

SEQ ID NO: 46225 - protein, 8 aa, Artificial Sequence
  Peptide Derived from Human Papillomavirus
SFLSHVKI

SEQ ID NO: 46226 - protein, 8 aa, Artificial Sequence
  Peptide Derived from Human Papillomavirus
YYNGDCGW

SEQ ID NO: 46227 - protein, 8 aa, Artificial Sequence
  Peptide Derived from Human Papillomavirus
CYRCQSPL

SEQ ID NO: 46228 - protein, 11 aa, Artificial Sequence
  Peptide Derived from Human Papillomavirus
DFPYAVCRVCL

SEQ ID NO: 46229 - protein, 9 aa, Artificial Sequence
  Peptide Derived from Human Papillomavirus
DYSVYGATL

SEQ ID NO: 46230 - protein, 10 aa, Artificial Sequence
  Peptide Derived from Human Papillomavirus
GWTGSCLGCW

SEQ ID NO: 46231 - protein, 9 aa, Artificial Sequence
  Peptide Derived from Human Papillomavirus
NFACTELKL

SEQ ID NO: 46232 - protein, 9 aa, Artificial Sequence
  Peptide Derived from Human Papillomavirus
PYAVCRVCL

SEQ ID NO: 46233 - protein, 10 aa, Artificial Sequence
  Peptide Derived from Human Papillomavirus
PYAVCRVCLL

SEQ ID NO: 46234 - protein, 11 aa, Artificial Sequence
  Peptide Derived from Human Papillomavirus
PYAVCRVCLLF

SEQ ID NO: 46235 - protein, 9 aa, Artificial Sequence
  Peptide Derived from Human Papillomavirus
RFHLIAHGW

SEQ ID NO: 46236 - protein, 9 aa, Artificial Sequence
  Peptide Derived from Human Papillomavirus
VYGATLESI

SEQ ID NO: 46237 - protein, 9 aa, Artificial Sequence
  Peptide Derived from Human Papillomavirus
VYNFACTEL

SEQ ID NO: 46238 - protein, 11 aa, Artificial Sequence
  Peptide Derived from Human Papillomavirus
VYNFACTELKL

SEQ ID NO: 46239 - protein, 11 aa, Artificial Sequence
  Peptide Derived from Human Papillomavirus
YYDYSVYGATL

SEQ ID NO: 46240 - protein, 8 aa, Artificial Sequence
  Peptide Derived from Human Papillomavirus
KFVVQLDI

SEQ ID NO: 46241 - protein, 11 aa, Artificial Sequence
  Peptide Derived from Human Papillomavirus
LMGALTVTCPL

SEQ ID NO: 46242 - protein, 8 aa, Artificial Sequence
  Peptide Derived from Human Papillomavirus
AYGDSMWF

SEQ ID NO: 46243 - protein, 10 aa, Artificial Sequence
  Peptide Derived from Human Papillomavirus
AYGDSMWFYL

SEQ ID NO: 46244 - protein, 10 aa, Artificial Sequence
  Peptide Derived from Human Papillomavirus
AYLHNMNANL

SEQ ID NO: 46245 - protein, 11 aa, Artificial Sequence
  Peptide Derived from Human Papillomavirus
AYLHNMNANLL

SEQ ID NO: 46246 - protein, 11 aa, Artificial Sequence
  Peptide Derived from Human Papillomavirus
AYQYRVFRVRL

SEQ ID NO: 46247 - protein, 8 aa, Artificial Sequence
  Peptide Derived from Human Papillomavirus
EYELQFVF

SEQ ID NO: 46248 - protein, 10 aa, Artificial Sequence
  Peptide Derived from Human Papillomavirus
EYELQFVFQL

SEQ ID NO: 46249 - protein, 10 aa, Artificial Sequence
  Peptide Derived from Human Papillomavirus
FWDVNLQDSF

SEQ ID NO: 46250 - protein, 9 aa, Artificial Sequence
  Peptide Derived from Human Papillomavirus
FYHAGSSRL

SEQ ID NO: 46251 - protein, 10 aa, Artificial Sequence
  Peptide Derived from Human Papillomavirus
FYHAGSSRLL

SEQ ID NO: 46252 - protein, 8 aa, Artificial Sequence
  Peptide Derived from Human Papillomavirus
FYLRREQL

SEQ ID NO: 46253 - protein, 9 aa, Artificial Sequence
  Peptide Derived from Human Papillomavirus
FYLRREQLF

SEQ ID NO: 46254 - protein, 10 aa, Artificial Sequence
  Peptide Derived from Human Papillomavirus
GFGAMDFKVL

SEQ ID NO: 46255 - protein, 8 aa, Artificial Sequence
  Peptide Derived from Human Papillomavirus
HYGLCIFL

SEQ ID NO: 46256 - protein, 11 aa, Artificial Sequence
  Peptide Derived from Human Papillomavirus
IFLDVGAVNVF

SEQ ID NO: 46257 - protein, 8 aa, Artificial Sequence
  Peptide Derived from Human Papillomavirus
IFLQMATW

SEQ ID NO: 46258 - protein, 10 aa, Artificial Sequence
  Peptide Derived from Human Papillomavirus
IFYHAGSSRL

SEQ ID NO: 46259 - protein, 11 aa, Artificial Sequence
  Peptide Derived from Human Papillomavirus
IFYHAGSSRLL

SEQ ID NO: 46260 - protein, 9 aa, Artificial Sequence
  Peptide Derived from Human Papillomavirus
IYNPDQERL

SEQ ID NO: 46261 - protein, 11 aa, Artificial Sequence
  Peptide Derived from Human Papillomavirus
IYNPDQERLVW

SEQ ID NO: 46262 - protein, 11 aa, Artificial Sequence
  Peptide Derived from Human Papillomavirus
IYRDPPLHYGL

SEQ ID NO: 46263 - protein, 9 aa, Artificial Sequence
  Peptide Derived from Human Papillomavirus
KFGLPDTNI

SEQ ID NO: 46264 - protein, 11 aa, Artificial Sequence
  Peptide Derived from Human Papillomavirus
KFWDVNLQDSF

SEQ ID NO: 46265 - protein, 11 aa, Artificial Sequence
  Peptide Derived from Human Papillomavirus
KYDARKINQYL

SEQ ID NO: 46266 - protein, 9 aa, Artificial Sequence
  Peptide Derived from Human Papillomavirus
KYKFWDVNL

SEQ ID NO: 46267 - protein, 10 aa, Artificial Sequence
  Peptide Derived from Human Papillomavirus
KYRYVRSTAI

SEQ ID NO: 46268 - protein, 8 aa, Artificial Sequence
  Peptide Derived from Human Papillomavirus
LFNKPYWL

SEQ ID NO: 46269 - protein, 8 aa, Artificial Sequence
  Peptide Derived from Human Papillomavirus
MMLPMMYI

SEQ ID NO: 46270 - protein, 10 aa, Artificial Sequence
  Peptide Derived from Human Papillomavirus
MMYIYRDPPL

SEQ ID NO: 46271 - protein, 10 aa, Artificial Sequence
  Peptide Derived from Human Papillomavirus
MWFYLRREQL

SEQ ID NO: 46272 - protein, 11 aa, Artificial Sequence
  Peptide Derived from Human Papillomavirus
MWFYLRREQLF

SEQ ID NO: 46273 - protein, 9 aa, Artificial Sequence
  Peptide Derived from Human Papillomavirus
MYIYRDPPL

SEQ ID NO: 46274 - protein, 10 aa, Artificial Sequence
  Peptide Derived from Human Papillomavirus
NMNANLLEDW

SEQ ID NO: 46275 - protein, 11 aa, Artificial Sequence
  Peptide Derived from Human Papillomavirus
NMTISTATEQL

SEQ ID NO: 46276 - protein, 11 aa, Artificial Sequence
  Peptide Derived from Human Papillomavirus
PMMYIYRDPPL

SEQ ID NO: 46277 - protein, 8 aa, Artificial Sequence
  Peptide Derived from Human Papillomavirus
QFPLGRKF

SEQ ID NO: 46278 - protein, 9 aa, Artificial Sequence
  Peptide Derived from Human Papillomavirus
QFPLGRKFL

SEQ ID NO: 46279 - protein, 9 aa, Artificial Sequence
  Peptide Derived from Human Papillomavirus
QFVFQLCKI

SEQ ID NO: 46280 - protein, 11 aa, Artificial Sequence
  Peptide Derived from Human Papillomavirus
QFVFQLCKITL

SEQ ID NO: 46281 - protein, 11 aa, Artificial Sequence
  Peptide Derived from Human Papillomavirus
QYLRHVEEYEL

SEQ ID NO: 46282 - protein, 9 aa, Artificial Sequence
  Peptide Derived from Human Papillomavirus
QYRVFRVRL

SEQ ID NO: 46283 - protein, 8 aa, Artificial Sequence
  Peptide Derived from Human Papillomavirus
RYVRSTAI

SEQ ID NO: 46284 - protein, 9 aa, Artificial Sequence
  Peptide Derived from Human Papillomavirus
SFSTDLDQF

SEQ ID NO: 46285 - protein, 11 aa, Artificial Sequence
  Peptide Derived from Human Papillomavirus
SFSTDLDQFPL

SEQ ID NO: 46286 - protein, 9 aa, Artificial Sequence
  Peptide Derived from Human Papillomavirus
SMITSEAQL

SEQ ID NO: 46287 - protein, 10 aa, Artificial Sequence
  Peptide Derived from Human Papillomavirus
SMITSEAQLF

SEQ ID NO: 46288 - protein, 11 aa, Artificial Sequence
  Peptide Derived from Human Papillomavirus
SMWFYLRREQL

SEQ ID NO: 46289 - protein, 8 aa, Artificial Sequence
  Peptide Derived from Human Papillomavirus
SYVKRTSI

SEQ ID NO: 46290 - protein, 9 aa, Artificial Sequence
  Peptide Derived from Human Papillomavirus
SYVKRTSIF

SEQ ID NO: 46291 - protein, 11 aa, Artificial Sequence
  Peptide Derived from Human Papillomavirus
TWRPSENKVYL

SEQ ID NO: 46292 - protein, 11 aa, Artificial Sequence
  Peptide Derived from Human Papillomavirus
VFPIFLQMATW

SEQ ID NO: 46293 - protein, 9 aa, Artificial Sequence
  Peptide Derived from Human Papillomavirus
VFQLCKITL

SEQ ID NO: 46294 - protein, 11 aa, Artificial Sequence
  Peptide Derived from Human Papillomavirus
VYVATPSGSMI

SEQ ID NO: 46295 - protein, 9 aa, Artificial Sequence
  Peptide Derived from Human Papillomavirus
WFYLRREQL

SEQ ID NO: 46296 - protein, 10 aa, Artificial Sequence
  Peptide Derived from Human Papillomavirus
WFYLRREQLF

SEQ ID NO: 46297 - protein, 9 aa, Artificial Sequence
  Peptide Derived from Human Papillomavirus
AFLDRPATL

SEQ ID NO: 46298 - protein, 11 aa, Artificial Sequence
  Peptide Derived from Human Papillomavirus
AFTTRRGGVRF

SEQ ID NO: 46299 - protein, 8 aa, Artificial Sequence
  Peptide Derived from Human Papillomavirus
DFMNIVAL

SEQ ID NO: 46300 - protein, 10 aa, Artificial Sequence
  Peptide Derived from Human Papillomavirus
FFRRRRRKRI

SEQ ID NO: 46301 - protein, 9 aa, Artificial Sequence
  Peptide Derived from Human Papillomavirus
FYSGPDIVL

SEQ ID NO: 46302 - protein, 10 aa, Artificial Sequence
  Peptide Derived from Human Papillomavirus
GFRRIAAPRL

SEQ ID NO: 46303 - protein, 9 aa, Artificial Sequence
  Peptide Derived from Human Papillomavirus
HYYYDISPI

SEQ ID NO: 46304 - protein, 9 aa, Artificial Sequence
  Peptide Derived from Human Papillomavirus
LFEGTDTSL

SEQ ID NO: 46305 - protein, 11 aa, Artificial Sequence
  Peptide Derived from Human Papillomavirus
LFEGTDTSLAF

SEQ ID NO: 46306 - protein, 8 aa, Artificial Sequence
  Peptide Derived from Human Papillomavirus
LFIDPPVI

SEQ ID NO: 46307 - protein, 8 aa, Artificial Sequence
  Peptide Derived from Human Papillomavirus
LFTYFGGL

SEQ ID NO: 46308 - protein, 10 aa, Artificial Sequence
  Peptide Derived from Human Papillomavirus
LFTYFGGLGI

SEQ ID NO: 46309 - protein, 8 aa, Artificial Sequence
  Peptide Derived from Human Papillomavirus
LYDIYANI

SEQ ID NO: 46310 - protein, 8 aa, Artificial Sequence
  Peptide Derived from Human Papillomavirus
NFTGSGGF

SEQ ID NO: 46311 - protein, 10 aa, Artificial Sequence
  Peptide Derived from Human Papillomavirus
NFTGSGGFEI

SEQ ID NO: 46312 - protein, 8 aa, Artificial Sequence
  Peptide Derived from Human Papillomavirus
PFYSGPDI

SEQ ID NO: 46313 - protein, 10 aa, Artificial Sequence
  Peptide Derived from Human Papillomavirus
PFYSGPDIVL

SEQ ID NO: 46314 - protein, 10 aa, Artificial Sequence
  Peptide Derived from Human Papillomavirus
PYDVTHDVYI

SEQ ID NO: 46315 - protein, 9 aa, Artificial Sequence
  Peptide Derived from Human Papillomavirus
QWGSLFTYF

SEQ ID NO: 46316 - protein, 11 aa, Artificial Sequence
  Peptide Derived from Human Papillomavirus
RFSRLGRKATI

SEQ ID NO: 46317 - protein, 9 aa, Artificial Sequence
  Peptide Derived from Human Papillomavirus
SFALWPVYF

SEQ ID NO: 46318 - protein, 10 aa, Artificial Sequence
  Peptide Derived from Human Papillomavirus
SFALWPVYFF

SEQ ID NO: 46319 - protein, 8 aa, Artificial Sequence
  Peptide Derived from Human Papillomavirus
SFDGLYDI

SEQ ID NO: 46320 - protein, 10 aa, Artificial Sequence
  Peptide Derived from Human Papillomavirus
SYEEIPMQTF

SEQ ID NO: 46321 - protein, 9 aa, Artificial Sequence
  Peptide Derived from Human Papillomavirus
TWADKILQW

SEQ ID NO: 46322 - protein, 8 aa, Artificial Sequence
  Peptide Derived from Human Papillomavirus
TYFGGLGI

SEQ ID NO: 46323 - protein, 8 aa, Artificial Sequence
  Peptide Derived from Human Papillomavirus
VYIQGSSF

SEQ ID NO: 46324 - protein, 10 aa, Artificial Sequence
  Peptide Derived from Human Papillomavirus
VYIQGSSFAL

SEQ ID NO: 46325 - protein, 11 aa, Artificial Sequence
  Peptide Derived from Human Papillomavirus
VYIQGSSFALW

SEQ ID NO: 46326 - protein, 11 aa, Artificial Sequence
  Peptide Derived from Human Papillomavirus
YFFRRRRRKRI

SEQ ID NO: 46327 - protein, 8 aa, Artificial Sequence
  Peptide Derived from Human Papillomavirus
YYYDISPI

SEQ ID NO: 46328 - protein, 15 aa, Artificial Sequence
  Peptide Derived from Human Papillomavirus
AAALYWYKTGISNIS

SEQ ID NO: 46329 - protein, 15 aa, Artificial Sequence
  Peptide Derived from Human Papillomavirus
ACSWGMVVLLLVRYK

SEQ ID NO: 46330 - protein, 15 aa, Artificial Sequence
  Peptide Derived from Human Papillomavirus
AFGLTPSIADSIKTL

SEQ ID NO: 46331 - protein, 15 aa, Artificial Sequence
  Peptide Derived from Human Papillomavirus
AKIVKDCATMCRHYK

SEQ ID NO: 46332 - protein, 15 aa, Artificial Sequence
  Peptide Derived from Human Papillomavirus
ALYWYKTGISNISEV

SEQ ID NO: 46333 - protein, 15 aa, Artificial Sequence
  Peptide Derived from Human Papillomavirus
ASAFLKSNSQAKIVK

SEQ ID NO: 46334 - protein, 15 aa, Artificial Sequence
  Peptide Derived from Human Papillomavirus
CLYLHIQSLACSWGM

SEQ ID NO: 46335 - protein, 15 aa, Artificial Sequence
  Peptide Derived from Human Papillomavirus
CMMIEPPKLRSTAAA

SEQ ID NO: 46336 - protein, 15 aa, Artificial Sequence
  Peptide Derived from Human Papillomavirus
CNGWFYVEAVVEKKT

SEQ ID NO: 46337 - protein, 15 aa, Artificial Sequence
  Peptide Derived from Human Papillomavirus
CWNYIDDNLRNALDG

SEQ ID NO: 46338 - protein, 15 aa, Artificial Sequence
  Peptide Derived from Human Papillomavirus
DCTFELSQMVQWAYD

SEQ ID NO: 46339 - protein, 15 aa, Artificial Sequence
  Peptide Derived from Human Papillomavirus
DGNLVSMDVKHRPLV

SEQ ID NO: 46340 - protein, 15 aa, Artificial Sequence
  Peptide Derived from Human Papillomavirus
DKNWKSFFSRTWSRL

SEQ ID NO: 46341 - protein, 15 aa, Artificial Sequence
  Peptide Derived from Human Papillomavirus
DSEIAYKYAQLADTN

SEQ ID NO: 46342 - protein, 15 aa, Artificial Sequence
  Peptide Derived from Human Papillomavirus
DSGYGNTEVETQQML

SEQ ID NO: 46343 - protein, 15 aa, Artificial Sequence
  Peptide Derived from Human Papillomavirus
DWCIAAFGLTPSIAD

SEQ ID NO: 46344 - protein, 15 aa, Artificial Sequence
  Peptide Derived from Human Papillomavirus
EIAYKYAQLADTNSN

SEQ ID NO: 46345 - protein, 15 aa, Artificial Sequence
  Peptide Derived from Human Papillomavirus
EKLLSKLLCVSPMCM

SEQ ID NO: 46346 - protein, 12 aa, Artificial Sequence
  Peptide Derived from Human Papillomavirus
FKCVSGQNTNTL

SEQ ID NO: 46347 - protein, 15 aa, Artificial Sequence
  Peptide Derived from Human Papillomavirus
GDSLPTFKCVSGQNT

SEQ ID NO: 46348 - protein, 15 aa, Artificial Sequence
  Peptide Derived from Human Papillomavirus
GEDLVDFIVNDNDYL

SEQ ID NO: 46349 - protein, 15 aa, Artificial Sequence
  Peptide Derived from Human Papillomavirus
GEGVSERHTICQTPL

SEQ ID NO: 46350 - protein, 15 aa, Artificial Sequence
  Peptide Derived from Human Papillomavirus
GGDWKQIVMFLRYQG

SEQ ID NO: 46351 - protein, 15 aa, Artificial Sequence
  Peptide Derived from Human Papillomavirus
GKSLFGMSLMKFLQG

SEQ ID NO: 46352 - protein, 15 aa, Artificial Sequence
  Peptide Derived from Human Papillomavirus
GSVICFVNSKSHFWL

SEQ ID NO: 46353 - protein, 15 aa, Artificial Sequence
  Peptide Derived from Human Papillomavirus
GVEFMSFLTALKRFL

SEQ ID NO: 46354 - protein, 15 aa, Artificial Sequence
  Peptide Derived from Human Papillomavirus
GWFYVEAVVEKKTGD

SEQ ID NO: 46355 - protein, 15 aa, Artificial Sequence
  Peptide Derived from Human Papillomavirus
HALFTAQEAKQHRDA

SEQ ID NO: 46356 - protein, 15 aa, Artificial Sequence
  Peptide Derived from Human Papillomavirus
HRPLVQLKCPPLLIT

SEQ ID NO: 46357 - protein, 15 aa, Artificial Sequence
  Peptide Derived from Human Papillomavirus
IAAFGLTPSIADSIK

SEQ ID NO: 46358 - protein, 15 aa, Artificial Sequence
  Peptide Derived from Human Papillomavirus
IEKLLSKLLCVSPMC

SEQ ID NO: 46359 - protein, 15 aa, Artificial Sequence
  Peptide Derived from Human Papillomavirus
IGMLDDATVPCWNYI

SEQ ID NO: 46360 - protein, 15 aa, Artificial Sequence
  Peptide Derived from Human Papillomavirus
IKTLLQQYCLYLHIQ

SEQ ID NO: 46361 - protein, 15 aa, Artificial Sequence
  Peptide Derived from Human Papillomavirus
ILLYGAANTGKSLFG

SEQ ID NO: 46362 - protein, 15 aa, Artificial Sequence
  Peptide Derived from Human Papillomavirus
ISEVYGDTPEWIQRQ

SEQ ID NO: 46363 - protein, 15 aa, Artificial Sequence
  Peptide Derived from Human Papillomavirus
KELYGVSFSELVRPF

SEQ ID NO: 46364 - protein, 15 aa, Artificial Sequence
  Peptide Derived from Human Papillomavirus
KIGMLDDATVPCWNY

SEQ ID NO: 46365 - protein, 15 aa, Artificial Sequence
  Peptide Derived from Human Papillomavirus
KNCILLYGAANTGKS

SEQ ID NO: 46366 - protein, 15 aa, Artificial Sequence
  Peptide Derived from Human Papillomavirus
KRKYLVSPLSDISGC

SEQ ID NO: 46367 - protein, 15 aa, Artificial Sequence
  Peptide Derived from Human Papillomavirus
KSFFSRTWSRLSLHE

SEQ ID NO: 46368 - protein, 15 aa, Artificial Sequence
  Peptide Derived from Human Papillomavirus
KSHFWLQPLADAKIG

SEQ ID NO: 46369 - protein, 15 aa, Artificial Sequence
  Peptide Derived from Human Papillomavirus
KSLFGMSLMKFLQGS

SEQ ID NO: 46370 - protein, 15 aa, Artificial Sequence
  Peptide Derived from Human Papillomavirus
KTLLQQYCLYLHIQS

SEQ ID NO: 46371 - protein, 15 aa, Artificial Sequence
  Peptide Derived from Human Papillomavirus
LKRFLQGIPKKNCIL

SEQ ID NO: 46372 - protein, 15 aa, Artificial Sequence
  Peptide Derived from Human Papillomavirus
LLCVSPMCMMIEPPK

SEQ ID NO: 46373 - protein, 15 aa, Artificial Sequence
  Peptide Derived from Human Papillomavirus
LMKFLQGSVICFVNS

SEQ ID NO: 46374 - protein, 15 aa, Artificial Sequence
  Peptide Derived from Human Papillomavirus
LNVLKTSNAKAAMLA

SEQ ID NO: 46375 - protein, 15 aa, Artificial Sequence
  Peptide Derived from Human Papillomavirus
LQGIPKKNCILLYGA

SEQ ID NO: 46376 - protein, 15 aa, Artificial Sequence
  Peptide Derived from Human Papillomavirus
LQPLADAKIGMLDDA

SEQ ID NO: 46377 - protein, 15 aa, Artificial Sequence
  Peptide Derived from Human Papillomavirus
LSKLLCVSPMCMMIE

SEQ ID NO: 46378 - protein, 15 aa, Artificial Sequence
  Peptide Derived from Human Papillomavirus
LVQLKCPPLLITSNI

SEQ ID NO: 46379 - protein, 15 aa, Artificial Sequence
  Peptide Derived from Human Papillomavirus
LYGVSFSELVRPFKS

SEQ ID NO: 46380 - protein, 15 aa, Artificial Sequence
  Peptide Derived from Human Papillomavirus
LYWYKTGISNISEVY

SEQ ID NO: 46381 - protein, 15 aa, Artificial Sequence
  Peptide Derived from Human Papillomavirus
MKFLQGSVICFVNSK

SEQ ID NO: 46382 - protein, 15 aa, Artificial Sequence
  Peptide Derived from Human Papillomavirus
MSQWIKYRCDRVDDG

SEQ ID NO: 46383 - protein, 15 aa, Artificial Sequence
  Peptide Derived from Human Papillomavirus
NCILLYGAANTGKSL

SEQ ID NO: 46384 - protein, 15 aa, Artificial Sequence
  Peptide Derived from Human Papillomavirus
NDIVDDSEIAYKYAQ

SEQ ID NO: 46385 - protein, 15 aa, Artificial Sequence
  Peptide Derived from Human Papillomavirus
NDYLTQAETETAHAL

SEQ ID NO: 46386 - protein, 15 aa, Artificial Sequence
  Peptide Derived from Human Papillomavirus
NGWFYVEAVVEKKTG

SEQ ID NO: 46387 - protein, 15 aa, Artificial Sequence
  Peptide Derived from Human Papillomavirus
NRLVVFTFPNEFPFD

SEQ ID NO: 46388 - protein, 15 aa, Artificial Sequence
  Peptide Derived from Human Papillomavirus
NTEVETQQMLQVEGR

SEQ ID NO: 46389 - protein, 15 aa, Artificial Sequence
  Peptide Derived from Human Papillomavirus
PEWIQRQTVLQHSFN

SEQ ID NO: 46390 - protein, 15 aa, Artificial Sequence
  Peptide Derived from Human Papillomavirus
PMCMMIEPPKLRSTA

SEQ ID NO: 46391 - protein, 15 aa, Artificial Sequence
  Peptide Derived from Human Papillomavirus
PPKLRSTAAALYWYK

SEQ ID NO: 46392 - protein, 15 aa, Artificial Sequence
  Peptide Derived from Human Papillomavirus
PPLLITSNINAGTDS

SEQ ID NO: 46393 - protein, 15 aa, Artificial Sequence
  Peptide Derived from Human Papillomavirus
QAKIVKDCATMCRHY

SEQ ID NO: 46394 - protein, 15 aa, Artificial Sequence
  Peptide Derived from Human Papillomavirus
QWAYDNDIVDDSEIA

SEQ ID NO: 46395 - protein, 15 aa, Artificial Sequence
  Peptide Derived from Human Papillomavirus
RETIEKLLSKLLCVS

SEQ ID NO: 46396 - protein, 15 aa, Artificial Sequence
  Peptide Derived from Human Papillomavirus
RHTICQTPLTNILNV

SEQ ID NO: 46397 - protein, 15 aa, Artificial Sequence
  Peptide Derived from Human Papillomavirus
RKYLVSPLSDISGCV

SEQ ID NO: 46398 - protein, 15 aa, Artificial Sequence
  Peptide Derived from Human Papillomavirus
RNALDGNLVSMDVKH

SEQ ID NO: 46399 - protein, 15 aa, Artificial Sequence
  Peptide Derived from Human Papillomavirus
RPLVQLKCPPLLITS

SEQ ID NO: 46400 - protein, 15 aa, Artificial Sequence
  Peptide Derived from Human Papillomavirus
RRLFESEDSGYGNTE

SEQ ID NO: 46401 - protein, 15 aa, Artificial Sequence
  Peptide Derived from Human Papillomavirus
RWPYLHNRLVVFTFP

SEQ ID NO: 46402 - protein, 15 aa, Artificial Sequence
  Peptide Derived from Human Papillomavirus
SELVRPFKSNKSTCC

SEQ ID NO: 46403 - protein, 15 aa, Artificial Sequence
  Peptide Derived from Human Papillomavirus
SGCVDNNISPRLKAI

SEQ ID NO: 46404 - protein, 15 aa, Artificial Sequence
  Peptide Derived from Human Papillomavirus
SHFWLQPLADAKIGM

SEQ ID NO: 46405 - protein, 15 aa, Artificial Sequence
  Peptide Derived from Human Papillomavirus
SKLLCVSPMCMMIEP

SEQ ID NO: 46406 - protein, 15 aa, Artificial Sequence
  Peptide Derived from Human Papillomavirus
SMDVKHRPLVQLKCP

SEQ ID NO: 46407 - protein, 15 aa, Artificial Sequence
  Peptide Derived from Human Papillomavirus
SPRLKAICIEKQSRA

SEQ ID NO: 46408 - protein, 15 aa, Artificial Sequence
  Peptide Derived from Human Papillomavirus
SRTWSRLSLHEDEDK

SEQ ID NO: 46409 - protein, 15 aa, Artificial Sequence
  Peptide Derived from Human Papillomavirus
SWGMVVLLLVRYKCG

SEQ ID NO: 46410 - protein, 15 aa, Artificial Sequence
  Peptide Derived from Human Papillomavirus
TNILNVLKTSNAKAA

SEQ ID NO: 46411 - protein, 15 aa, Artificial Sequence
  Peptide Derived from Human Papillomavirus
TPEWIQRQTVLQHSF

SEQ ID NO: 46412 - protein, 15 aa, Artificial Sequence
  Peptide Derived from Human Papillomavirus
VEAVVEKKTGDAISD

SEQ ID NO: 46413 - protein, 15 aa, Artificial Sequence
  Peptide Derived from Human Papillomavirus
VEFMSFLTALKRFLQ

SEQ ID NO: 46414 - protein, 15 aa, Artificial Sequence
  Peptide Derived from Human Papillomavirus
VFTFPNEFPFDENGN

SEQ ID NO: 46415 - protein, 15 aa, Artificial Sequence
  Peptide Derived from Human Papillomavirus
VICFVNSKSHFWLQP

SEQ ID NO: 46416 - protein, 15 aa, Artificial Sequence
  Peptide Derived from Human Papillomavirus
VLLLVRYKCGKNRET

SEQ ID NO: 46417 - protein, 15 aa, Artificial Sequence
  Peptide Derived from Human Papillomavirus
VMFLRYQGVEFMSFL

SEQ ID NO: 46418 - protein, 15 aa, Artificial Sequence
  Peptide Derived from Human Papillomavirus
VQVLKRKYLVSPLSD

SEQ ID NO: 46419 - protein, 15 aa, Artificial Sequence
  Peptide Derived from Human Papillomavirus
VRPFKSNKSTCCDWC

SEQ ID NO: 46420 - protein, 15 aa, Artificial Sequence
  Peptide Derived from Human Papillomavirus
WGMVVLLLVRYKCGK

SEQ ID NO: 46421 - protein, 15 aa, Artificial Sequence
  Peptide Derived from Human Papillomavirus
WIKYRCDRVDDGGDW

SEQ ID NO: 46422 - protein, 15 aa, Artificial Sequence
  Peptide Derived from Human Papillomavirus
WPYLHNRLVVFTFPN

SEQ ID NO: 46423 - protein, 15 aa, Artificial Sequence
  Peptide Derived from Human Papillomavirus
YAQLADTNSNASAFL

SEQ ID NO: 46424 - protein, 15 aa, Artificial Sequence
  Peptide Derived from Human Papillomavirus
YCLYLHIQSLACSWG

SEQ ID NO: 46425 - protein, 15 aa, Artificial Sequence
  Peptide Derived from Human Papillomavirus
YLHIQSLACSWGMVV

SEQ ID NO: 46426 - protein, 15 aa, Artificial Sequence
  Peptide Derived from Human Papillomavirus
AEKYSKNKVWEVHAG

SEQ ID NO: 46427 - protein, 15 aa, Artificial Sequence
  Peptide Derived from Human Papillomavirus
AIYYKAREMGFKHIN

SEQ ID NO: 46428 - protein, 15 aa, Artificial Sequence
  Peptide Derived from Human Papillomavirus
APILTAFNSSHKGRI

SEQ ID NO: 46429 - protein, 15 aa, Artificial Sequence
  Peptide Derived from Human Papillomavirus
AREMGFKHINHQVVP

SEQ ID NO: 46430 - protein, 15 aa, Artificial Sequence
  Peptide Derived from Human Papillomavirus
AVALGTEETQTTIQR

SEQ ID NO: 46431 - protein, 15 aa, Artificial Sequence
  Peptide Derived from Human Papillomavirus
CTLYTAVSSTWHWTG

SEQ ID NO: 46432 - protein, 15 aa, Artificial Sequence
  Peptide Derived from Human Papillomavirus
DQFLSQVKIPKTITV

SEQ ID NO: 46433 - protein, 15 aa, Artificial Sequence
  Peptide Derived from Human Papillomavirus
DVSLEVYLTAPTGCI

SEQ ID NO: 46434 - protein, 15 aa, Artificial Sequence
  Peptide Derived from Human Papillomavirus
EGQVDYYGLYYVHEG

SEQ ID NO: 46435 - protein, 15 aa, Artificial Sequence
  Peptide Derived from Human Papillomavirus
ELQLTLETIYNSQYS

SEQ ID NO: 46436 - protein, 15 aa, Artificial Sequence
  Peptide Derived from Human Papillomavirus
ETIYNSQYSNEKWTL

SEQ ID NO: 46437 - protein, 15 aa, Artificial Sequence
  Peptide Derived from Human Papillomavirus
EVQFDGDICNTMHYT

SEQ ID NO: 46438 - protein, 15 aa, Artificial Sequence
  Peptide Derived from Human Papillomavirus
FKHINHQVVPTLAVS

SEQ ID NO: 46439 - protein, 15 aa, Artificial Sequence
  Peptide Derived from Human Papillomavirus
GGQVILCPTSVFSSN

SEQ ID NO: 46440 - protein, 15 aa, Artificial Sequence
  Peptide Derived from Human Papillomavirus
GHNVKHKSAIVTLTY

SEQ ID NO: 46441 - protein, 15 aa, Artificial Sequence
  Peptide Derived from Human Papillomavirus
GLYYVHEGIRTYFVQ

SEQ ID NO: 46442 - protein, 15 aa, Artificial Sequence
  Peptide Derived from Human Papillomavirus
GQVILCPTSVFSSNE

SEQ ID NO: 46443 - protein, 15 aa, Artificial Sequence
  Peptide Derived from Human Papillomavirus
HCTLYTAVSSTWHWT

SEQ ID NO: 46444 - protein, 15 aa, Artificial Sequence
  Peptide Derived from Human Papillomavirus
HEGIRTYFVQFKDDA

SEQ ID NO: 46445 - protein, 15 aa, Artificial Sequence
  Peptide Derived from Human Papillomavirus
HIYICEEASVTVVEG

SEQ ID NO: 46446 - protein, 15 aa, Artificial Sequence
  Peptide Derived from Human Papillomavirus
HQVVPTLAVSKNKAL

SEQ ID NO: 46447 - protein, 15 aa, Artificial Sequence
  Peptide Derived from Human Papillomavirus
IDYWKHMRLECAIYY

SEQ ID NO: 46448 - protein, 15 aa, Artificial Sequence
  Peptide Derived from Human Papillomavirus
KNKVWEVHAGGQVIL

SEQ ID NO: 46449 - protein, 15 aa, Artificial Sequence
  Peptide Derived from Human Papillomavirus
KWTLQDVSLEVYLTA

SEQ ID NO: 46450 - protein, 15 aa, Artificial Sequence
  Peptide Derived from Human Papillomavirus
LEVYLTAPTGCIKKH

SEQ ID NO: 46451 - protein, 15 aa, Artificial Sequence
  Peptide Derived from Human Papillomavirus
LQAIELQLTLETIYN

SEQ ID NO: 46452 - protein, 15 aa, Artificial Sequence
  Peptide Derived from Human Papillomavirus
LSQVKIPKTITVSTG

SEQ ID NO: 46453 - protein, 15 aa, Artificial Sequence
  Peptide Derived from Human Papillomavirus
LTHYENDSTDLRDHI

SEQ ID NO: 46454 - protein, 15 aa, Artificial Sequence
  Peptide Derived from Human Papillomavirus
NEKWTLQDVSLEVYL

SEQ ID NO: 46455 - protein, 15 aa, Artificial Sequence
  Peptide Derived from Human Papillomavirus
NHQVVPTLAVSKNKA

SEQ ID NO: 46456 - protein, 15 aa, Artificial Sequence
  Peptide Derived from Human Papillomavirus
NKALQAIELQLTLET

SEQ ID NO: 46457 - protein, 15 aa, Artificial Sequence
  Peptide Derived from Human Papillomavirus
PEIIRQHLANHPAAT

SEQ ID NO: 46458 - protein, 15 aa, Artificial Sequence
  Peptide Derived from Human Papillomavirus
QTTIQRPRSEPDTGN

SEQ ID NO: 46459 - protein, 15 aa, Artificial Sequence
  Peptide Derived from Human Papillomavirus
QVILCPTSVFSSNEV

SEQ ID NO: 46460 - protein, 15 aa, Artificial Sequence
  Peptide Derived from Human Papillomavirus
QVKIPKTITVSTGFM

SEQ ID NO: 46461 - protein, 15 aa, Artificial Sequence
  Peptide Derived from Human Papillomavirus
RDSVDSAPILTAFNS

SEQ ID NO: 46462 - protein, 15 aa, Artificial Sequence
  Peptide Derived from Human Papillomavirus
RLNVCQDKILTHYEN

SEQ ID NO: 46463 - protein, 15 aa, Artificial Sequence
  Peptide Derived from Human Papillomavirus
RQHLANHPAATHTKA

SEQ ID NO: 46464 - protein, 15 aa, Artificial Sequence
  Peptide Derived from Human Papillomavirus
RYRFKKHCTLYTAVS

SEQ ID NO: 46465 - protein, 15 aa, Artificial Sequence
  Peptide Derived from Human Papillomavirus
SLEVYLTAPTGCIKK

SEQ ID NO: 46466 - protein, 15 aa, Artificial Sequence
  Peptide Derived from Human Papillomavirus
SNEVSSPEIIRQHLA

SEQ ID NO: 46467 - protein, 15 aa, Artificial Sequence
  Peptide Derived from Human Papillomavirus
SPEIIRQHLANHPAA

SEQ ID NO: 46468 - protein, 15 aa, Artificial Sequence
  Peptide Derived from Human Papillomavirus
SVTVVEGQVDYYGLY

SEQ ID NO: 46469 - protein, 15 aa, Artificial Sequence
  Peptide Derived from Human Papillomavirus
THIYICEEASVTVVE

SEQ ID NO: 46470 - protein, 15 aa, Artificial Sequence
  Peptide Derived from Human Papillomavirus
TKLLHRDSVDSAPIL

SEQ ID NO: 46471 - protein, 15 aa, Artificial Sequence
  Peptide Derived from Human Papillomavirus
TLAVSKNKALQAIEL

SEQ ID NO: 46472 - protein, 15 aa, Artificial Sequence
  Peptide Derived from Human Papillomavirus
TSVFSSNEVSSPEII

SEQ ID NO: 46473 - protein, 15 aa, Artificial Sequence
  Peptide Derived from Human Papillomavirus
TTKLLHRDSVDSAPI

SEQ ID NO: 46474 - protein, 15 aa, Artificial Sequence
  Peptide Derived from Human Papillomavirus
TWHWTGHNVKHKSAI

SEQ ID NO: 46475 - protein, 15 aa, Artificial Sequence
  Peptide Derived from Human Papillomavirus
VDYYGLYYVHEGIRT

SEQ ID NO: 46476 - protein, 15 aa, Artificial Sequence
  Peptide Derived from Human Papillomavirus
WKHMRLECAIYYKAR

SEQ ID NO: 46477 - protein, 15 aa, Artificial Sequence
  Peptide Derived from Human Papillomavirus
YTNWTHIYICEEASV

SEQ ID NO: 46478 - protein, 15 aa, Artificial Sequence
  Peptide Derived from Human Papillomavirus
  VARIANT (1)..(3): Xaa= Any amino acid
XXXMTNLDTASTTLL

SEQ ID NO: 46479 - protein, 15 aa, Artificial Sequence
  Peptide Derived from Human Papillomavirus
ACFLLCFCVLLCVCL

SEQ ID NO: 46480 - protein, 15 aa, Artificial Sequence
  Peptide Derived from Human Papillomavirus
ASAFRCFIVYIIFVY

SEQ ID NO: 46481 - protein, 15 aa, Artificial Sequence
  Peptide Derived from Human Papillomavirus
CFCVLLCVCLLIRPL

SEQ ID NO: 46482 - protein, 15 aa, Artificial Sequence
  Peptide Derived from Human Papillomavirus
CFIVYIIFVYIPLFL

SEQ ID NO: 46483 - protein, 15 aa, Artificial Sequence
  Peptide Derived from Human Papillomavirus
CFLLCFCVLLCVCLL

SEQ ID NO: 46484 - protein, 15 aa, Artificial Sequence
  Peptide Derived from Human Papillomavirus
CLLIRPLLLSVSTYT

SEQ ID NO: 46485 - protein, 15 aa, Artificial Sequence
  Peptide Derived from Human Papillomavirus
CVCLLIRPLLLSVST

SEQ ID NO: 46486 - protein, 15 aa, Artificial Sequence
  Peptide Derived from Human Papillomavirus
CVLLCVCLLIRPLLL

SEQ ID NO: 46487 - protein, 15 aa, Artificial Sequence
  Peptide Derived from Human Papillomavirus
FCVLLCVCLLIRPLL

SEQ ID NO: 46488 - protein, 15 aa, Artificial Sequence
  Peptide Derived from Human Papillomavirus
FRCFIVYIIFVYIPL

SEQ ID NO: 46489 - protein, 15 aa, Artificial Sequence
  Peptide Derived from Human Papillomavirus
FVYIPLFLIHTHARF

SEQ ID NO: 46490 - protein, 15 aa, Artificial Sequence
  Peptide Derived from Human Papillomavirus
IFVYIPLFLIHTHAR

SEQ ID NO: 46491 - protein, 15 aa, Artificial Sequence
  Peptide Derived from Human Papillomavirus
IILVLLLWITAASAF

SEQ ID NO: 46492 - protein, 15 aa, Artificial Sequence
  Peptide Derived from Human Papillomavirus
ILVLLLWITAASAFR

SEQ ID NO: 46493 - protein, 15 aa, Artificial Sequence
  Peptide Derived from Human Papillomavirus
IRPLLLSVSTYTSLI

SEQ ID NO: 46494 - protein, 15 aa, Artificial Sequence
  Peptide Derived from Human Papillomavirus
IVYIIFVYIPLFLIH

SEQ ID NO: 46495 - protein, 15 aa, Artificial Sequence
  Peptide Derived from Human Papillomavirus
LACFLLCFCVLLCVC

SEQ ID NO: 46496 - protein, 15 aa, Artificial Sequence
  Peptide Derived from Human Papillomavirus
LLCFCVLLCVCLLIR

SEQ ID NO: 46497 - protein, 15 aa, Artificial Sequence
  Peptide Derived from Human Papillomavirus
LLLWITAASAFRCFI

SEQ ID NO: 46498 - protein, 15 aa, Artificial Sequence
  Peptide Derived from Human Papillomavirus
LLSVSTYTSLIILVL

SEQ ID NO: 46499 - protein, 15 aa, Artificial Sequence
  Peptide Derived from Human Papillomavirus
LLWITAASAFRCFIV

SEQ ID NO: 46500 - protein, 15 aa, Artificial Sequence
  Peptide Derived from Human Papillomavirus
LVLLLWITAASAFRC

SEQ ID NO: 46501 - protein, 15 aa, Artificial Sequence
  Peptide Derived from Human Papillomavirus
MTNLDTASTTLLACF

SEQ ID NO: 46502 - protein, 14 aa, Artificial Sequence
  Peptide Derived from Human Papillomavirus
PLFLIHTHARFLIT

SEQ ID NO: 46503 - protein, 15 aa, Artificial Sequence
  Peptide Derived from Human Papillomavirus
RPLLLSVSTYTSLII

SEQ ID NO: 46504 - protein, 15 aa, Artificial Sequence
  Peptide Derived from Human Papillomavirus
SLIILVLLLWITAAS

SEQ ID NO: 46505 - protein, 15 aa, Artificial Sequence
  Peptide Derived from Human Papillomavirus
STTLLACFLLCFCVL

SEQ ID NO: 46506 - protein, 15 aa, Artificial Sequence
  Peptide Derived from Human Papillomavirus
TSLIILVLLLWITAA

SEQ ID NO: 46507 - protein, 15 aa, Artificial Sequence
  Peptide Derived from Human Papillomavirus
TTLLACFLLCFCVLL

SEQ ID NO: 46508 - protein, 15 aa, Artificial Sequence
  Peptide Derived from Human Papillomavirus
VCLLIRPLLLSVSTY

SEQ ID NO: 46509 - protein, 15 aa, Artificial Sequence
  Peptide Derived from Human Papillomavirus
VLLLWITAASAFRCF

SEQ ID NO: 46510 - protein, 15 aa, Artificial Sequence
  Peptide Derived from Human Papillomavirus
VSTYTSLIILVLLLW

SEQ ID NO: 46511 - protein, 15 aa, Artificial Sequence
  Peptide Derived from Human Papillomavirus
VYIIFVYIPLFLIHT

SEQ ID NO: 46512 - protein, 15 aa, Artificial Sequence
  Peptide Derived from Human Papillomavirus
YIIFVYIPLFLIHTH

SEQ ID NO: 46513 - protein, 15 aa, Artificial Sequence
  Peptide Derived from Human Papillomavirus
YIPLFLIHTHARFLI

SEQ ID NO: 46514 - protein, 15 aa, Artificial Sequence
  Peptide Derived from Human Papillomavirus
YTSLIILVLLLWITA

SEQ ID NO: 46515 - protein, 15 aa, Artificial Sequence
  Peptide Derived from Human Papillomavirus
  VARIANT (1)..(3): Xaa= Any amino acid
XXXMHQKRTAMFQDP

SEQ ID NO: 46516 - protein, 15 aa, Artificial Sequence
  Peptide Derived from Human Papillomavirus
CIVYRDGNPYAVCDK

SEQ ID NO: 46517 - protein, 15 aa, Artificial Sequence
  Peptide Derived from Human Papillomavirus
CLKFYSKISEYRHYC

SEQ ID NO: 46518 - protein, 15 aa, Artificial Sequence
  Peptide Derived from Human Papillomavirus
CYSLYGTTLEQQYNK

SEQ ID NO: 46519 - protein, 15 aa, Artificial Sequence
  Peptide Derived from Human Papillomavirus
DFAFRDLCIVYRDGN

SEQ ID NO: 46520 - protein, 15 aa, Artificial Sequence
  Peptide Derived from Human Papillomavirus
DIILECVYCKQQLLR

SEQ ID NO: 46521 - protein, 15 aa, Artificial Sequence
  Peptide Derived from Human Papillomavirus
DLLIRCINCQKPLCP

SEQ ID NO: 46522 - protein, 15 aa, Artificial Sequence
  Peptide Derived from Human Papillomavirus
ECVYCKQQLLRREVY

SEQ ID NO: 46523 - protein, 15 aa, Artificial Sequence
  Peptide Derived from Human Papillomavirus
EQQYNKPLCDLLIRC

SEQ ID NO: 46524 - protein, 15 aa, Artificial Sequence
  Peptide Derived from Human Papillomavirus
FHNIRGRWTGRCMSC

SEQ ID NO: 46525 - protein, 15 aa, Artificial Sequence
  Peptide Derived from Human Papillomavirus
GRCMSCCRSSRTRRE

SEQ ID NO: 46526 - protein, 15 aa, Artificial Sequence
  Peptide Derived from Human Papillomavirus
HYCYSLYGTTLEQQY

SEQ ID NO: 46527 - protein, 15 aa, Artificial Sequence
  Peptide Derived from Human Papillomavirus
IHDIILECVYCKQQL

SEQ ID NO: 46528 - protein, 15 aa, Artificial Sequence
  Peptide Derived from Human Papillomavirus
IRCINCQKPLCPEEK

SEQ ID NO: 46529 - protein, 15 aa, Artificial Sequence
  Peptide Derived from Human Papillomavirus
KQQLLRREVYDFAFR

SEQ ID NO: 46530 - protein, 15 aa, Artificial Sequence
  Peptide Derived from Human Papillomavirus
LCDLLIRCINCQKPL

SEQ ID NO: 46531 - protein, 15 aa, Artificial Sequence
  Peptide Derived from Human Papillomavirus
NKPLCDLLIRCINCQ

SEQ ID NO: 46532 - protein, 15 aa, Artificial Sequence
  Peptide Derived from Human Papillomavirus
PRKLPQLCTELQTTI

SEQ ID NO: 46533 - protein, 15 aa, Artificial Sequence
  Peptide Derived from Human Papillomavirus
PYAVCDKCLKFYSKI

SEQ ID NO: 46534 - protein, 15 aa, Artificial Sequence
  Peptide Derived from Human Papillomavirus
QTTIHDIILECVYCK

SEQ ID NO: 46535 - protein, 15 aa, Artificial Sequence
  Peptide Derived from Human Papillomavirus
RGRWTGRCMSCCRSS

SEQ ID NO: 46536 - protein, 15 aa, Artificial Sequence
  Peptide Derived from Human Papillomavirus
VYDFAFRDLCIVYRD

SEQ ID NO: 46537 - protein, 15 aa, Artificial Sequence
  Peptide Derived from Human Papillomavirus
  VARIANT (1)..(3): Xaa= Any amino acid
XXXMHGDTPTLHEYM

SEQ ID NO: 46538 - protein, 15 aa, Artificial Sequence
  Peptide Derived from Human Papillomavirus
DLLMGTLGIVCPICS

SEQ ID NO: 46539 - protein, 15 aa, Artificial Sequence
  Peptide Derived from Human Papillomavirus
HEYMLDLQPETTDLY

SEQ ID NO: 46540 - protein, 15 aa, Artificial Sequence
  Peptide Derived from Human Papillomavirus
HYNIVTFCCKCDSTL

SEQ ID NO: 46541 - protein, 15 aa, Artificial Sequence
  Peptide Derived from Human Papillomavirus
IRTLEDLLMGTLGIV

SEQ ID NO: 46542 - protein, 15 aa, Artificial Sequence
  Peptide Derived from Human Papillomavirus
LEDLLMGTLGIVCPI

SEQ ID NO: 46543 - protein, 12 aa, Artificial Sequence
  Peptide Derived from Human Papillomavirus
LGIVCPICSQKP

SEQ ID NO: 46544 - protein, 15 aa, Artificial Sequence
  Peptide Derived from Human Papillomavirus
MGTLGIVCPICSQKP

SEQ ID NO: 46545 - protein, 15 aa, Artificial Sequence
  Peptide Derived from Human Papillomavirus
MLDLQPETTDLYCYE

SEQ ID NO: 46546 - protein, 15 aa, Artificial Sequence
  Peptide Derived from Human Papillomavirus
RLCVQSTHVDIRTLE

SEQ ID NO: 46547 - protein, 15 aa, Artificial Sequence
  Peptide Derived from Human Papillomavirus
STHVDIRTLEDLLMG

SEQ ID NO: 46548 - protein, 15 aa, Artificial Sequence
  Peptide Derived from Human Papillomavirus
TDLYCYEQLNDSSEE

SEQ ID NO: 46549 - protein, 13 aa, Artificial Sequence
  Peptide Derived from Human Papillomavirus
TLGIVCPICSQKP

SEQ ID NO: 46550 - protein, 15 aa, Artificial Sequence
  Peptide Derived from Human Papillomavirus
TLRLCVQSTHVDIRT

SEQ ID NO: 46551 - protein, 15 aa, Artificial Sequence
  Peptide Derived from Human Papillomavirus
TPTLHEYMLDLQPET

SEQ ID NO: 46552 - protein, 15 aa, Artificial Sequence
  Peptide Derived from Human Papillomavirus
  VARIANT (1)..(3): Xaa= Any amino acid
XXXMQVTFIYILVIT

SEQ ID NO: 46553 - protein, 15 aa, Artificial Sequence
  Peptide Derived from Human Papillomavirus
  VARIANT (1)..(1): Xaa= Any amino acid
XMQVTFIYILVITCY

SEQ ID NO: 46554 - protein, 15 aa, Artificial Sequence
  Peptide Derived from Human Papillomavirus
ADVMTYIHSMNSTIL

SEQ ID NO: 46555 - protein, 15 aa, Artificial Sequence
  Peptide Derived from Human Papillomavirus
AGAVGENVPDDLYIK

SEQ ID NO: 46556 - protein, 15 aa, Artificial Sequence
  Peptide Derived from Human Papillomavirus
AMDFTTLQANKSEVP

SEQ ID NO: 46557 - protein, 15 aa, Artificial Sequence
  Peptide Derived from Human Papillomavirus
ATVYLPPVPVSKVVS

SEQ ID NO: 46558 - protein, 15 aa, Artificial Sequence
  Peptide Derived from Human Papillomavirus
CAAISTSETTYKNTN

SEQ ID NO: 46559 - protein, 15 aa, Artificial Sequence
  Peptide Derived from Human Papillomavirus
CISMDYKQTQLCLIG

SEQ ID NO: 46560 - protein, 15 aa, Artificial Sequence
  Peptide Derived from Human Papillomavirus
CPPLELINTVIQDGD

SEQ ID NO: 46561 - protein, 15 aa, Artificial Sequence
  Peptide Derived from Human Papillomavirus
DEYVARTNIYYHAGT

SEQ ID NO: 46562 - protein, 15 aa, Artificial Sequence
  Peptide Derived from Human Papillomavirus
DLQFIFQLCKITLTA

SEQ ID NO: 46563 - protein, 15 aa, Artificial Sequence
  Peptide Derived from Human Papillomavirus
DLYIKGSGSTANLAS

SEQ ID NO: 46564 - protein, 15 aa, Artificial Sequence
  Peptide Derived from Human Papillomavirus
DTSFYNPDTQRLVWA

SEQ ID NO: 46565 - protein, 15 aa, Artificial Sequence
  Peptide Derived from Human Papillomavirus
DWNFGLQPPPGGTLE

SEQ ID NO: 46566 - protein, 15 aa, Artificial Sequence
  Peptide Derived from Human Papillomavirus
EATVYLPPVPVSKVV

SEQ ID NO: 46567 - protein, 15 aa, Artificial Sequence
  Peptide Derived from Human Papillomavirus
EDTYRFVTSQAIACQ

SEQ ID NO: 46568 - protein, 15 aa, Artificial Sequence
  Peptide Derived from Human Papillomavirus
ENDVNVYHIFFQMSL

SEQ ID NO: 46569 - protein, 15 aa, Artificial Sequence
  Peptide Derived from Human Papillomavirus
EVNLKEKFSADLDQF

SEQ ID NO: 46570 - protein, 15 aa, Artificial Sequence
  Peptide Derived from Human Papillomavirus
EVPLDICTSICKYPD

SEQ ID NO: 46571 - protein, 15 aa, Artificial Sequence
  Peptide Derived from Human Papillomavirus
FFQMSLWLPSEATVY

SEQ ID NO: 46572 - protein, 15 aa, Artificial Sequence
  Peptide Derived from Human Papillomavirus
FFYLRREQMFVRHLF

SEQ ID NO: 46573 - protein, 15 aa, Artificial Sequence
  Peptide Derived from Human Papillomavirus
FGAMDFTTLQANKSE

SEQ ID NO: 46574 - protein, 15 aa, Artificial Sequence
  Peptide Derived from Human Papillomavirus
FIYILVITCYENDVN

SEQ ID NO: 46575 - protein, 15 aa, Artificial Sequence
  Peptide Derived from Human Papillomavirus
FTTLQANKSEVPLDI

SEQ ID NO: 46576 - protein, 15 aa, Artificial Sequence
  Peptide Derived from Human Papillomavirus
GEEYDLQFIFQLCKI

SEQ ID NO: 46577 - protein, 15 aa, Artificial Sequence
  Peptide Derived from Human Papillomavirus
GEHWGKGSPCTNVAV

SEQ ID NO: 46578 - protein, 15 aa, Artificial Sequence
  Peptide Derived from Human Papillomavirus
GLQYRVFRIHLPDPN

SEQ ID NO: 46579 - protein, 15 aa, Artificial Sequence
  Peptide Derived from Human Papillomavirus
GNQLFVTVVDTTRST

SEQ ID NO: 46580 - protein, 15 aa, Artificial Sequence
  Peptide Derived from Human Papillomavirus
GQPLGVGISGHPLLN

SEQ ID NO: 46581 - protein, 15 aa, Artificial Sequence
  Peptide Derived from Human Papillomavirus
GVEVGRGQPLGVGIS

SEQ ID NO: 46582 - protein, 15 aa, Artificial Sequence
  Peptide Derived from Human Papillomavirus
GVGISGHPLLNKLDD

SEQ ID NO: 46583 - protein, 15 aa, Artificial Sequence
  Peptide Derived from Human Papillomavirus
HPYFPIKKPNNNKIL

SEQ ID NO: 46584 - protein, 15 aa, Artificial Sequence
  Peptide Derived from Human Papillomavirus
IFQLCKITLTADVMT

SEQ ID NO: 46585 - protein, 15 aa, Artificial Sequence
  Peptide Derived from Human Papillomavirus
IHSMNSTILEDWNFG

SEQ ID NO: 46586 - protein, 15 aa, Artificial Sequence
  Peptide Derived from Human Papillomavirus
KFTLGKRKATPTTSS

SEQ ID NO: 46587 - protein, 15 aa, Artificial Sequence
  Peptide Derived from Human Papillomavirus
KITLTADVMTYIHSM

SEQ ID NO: 46588 - protein, 15 aa, Artificial Sequence
  Peptide Derived from Human Papillomavirus
KSEVPLDICTSICKY

SEQ ID NO: 46589 - protein, 15 aa, Artificial Sequence
  Peptide Derived from Human Papillomavirus
KYTFWEVNLKEKFSA

SEQ ID NO: 46590 - protein, 15 aa, Artificial Sequence
  Peptide Derived from Human Papillomavirus
LCLIGCKPPIGEHWG

SEQ ID NO: 46591 - protein, 15 aa, Artificial Sequence
  Peptide Derived from Human Papillomavirus
LKKYTFWEVNLKEKF

SEQ ID NO: 46592 - protein, 15 aa, Artificial Sequence
  Peptide Derived from Human Papillomavirus
LPPVPVSKVVSTDEY

SEQ ID NO: 46593 - protein, 15 aa, Artificial Sequence
  Peptide Derived from Human Papillomavirus
MSLWLPSEATVYLPP

SEQ ID NO: 46594 - protein, 15 aa, Artificial Sequence
  Peptide Derived from Human Papillomavirus
MTYIHSMNSTILEDW

SEQ ID NO: 46595 - protein, 15 aa, Artificial Sequence
  Peptide Derived from Human Papillomavirus
NAGVDNRECISMDYK

SEQ ID NO: 46596 - protein, 15 aa, Artificial Sequence
  Peptide Derived from Human Papillomavirus
NIYYHAGTSRLLAVG

SEQ ID NO: 46597 - protein, 15 aa, Artificial Sequence
  Peptide Derived from Human Papillomavirus
NKILVPKVSGLQYRV

SEQ ID NO: 46598 - protein, 15 aa, Artificial Sequence
  Peptide Derived from Human Papillomavirus
NKPYWLQRAQGHNNG

SEQ ID NO: 46599 - protein, 15 aa, Artificial Sequence
  Peptide Derived from Human Papillomavirus
NMSLCAAISTSETTY

SEQ ID NO: 46600 - protein, 15 aa, Artificial Sequence
  Peptide Derived from Human Papillomavirus
NNKILVPKVSGLQYR

SEQ ID NO: 46601 - protein, 15 aa, Artificial Sequence
  Peptide Derived from Human Papillomavirus
NTVIQDGDMVDTGFG

SEQ ID NO: 46602 - protein, 15 aa, Artificial Sequence
  Peptide Derived from Human Papillomavirus
NVAVNPGDCPPLELI

SEQ ID NO: 46603 - protein, 15 aa, Artificial Sequence
  Peptide Derived from Human Papillomavirus
PDDLYIKGSGSTANL

SEQ ID NO: 46604 - protein, 15 aa, Artificial Sequence
  Peptide Derived from Human Papillomavirus
PLDICTSICKYPDYI

SEQ ID NO: 46605 - protein, 15 aa, Artificial Sequence
  Peptide Derived from Human Papillomavirus
PLELINTVIQDGDMV

SEQ ID NO: 46606 - protein, 15 aa, Artificial Sequence
  Peptide Derived from Human Papillomavirus
PNKFGFPDTSFYNPD

SEQ ID NO: 46607 - protein, 15 aa, Artificial Sequence
  Peptide Derived from Human Papillomavirus
PVPVSKVVSTDEYVA

SEQ ID NO: 46608 - protein, 15 aa, Artificial Sequence
  Peptide Derived from Human Papillomavirus
QFIFQLCKITLTADV

SEQ ID NO: 46609 - protein, 15 aa, Artificial Sequence
  Peptide Derived from Human Papillomavirus
QFPLGRKFLLQAGLK

SEQ ID NO: 46610 - protein, 15 aa, Artificial Sequence
  Peptide Derived from Human Papillomavirus
QLCLIGCKPPIGEHW

SEQ ID NO: 46611 - protein, 15 aa, Artificial Sequence
  Peptide Derived from Human Papillomavirus
QLFVTVVDTTRSTNM

SEQ ID NO: 46612 - protein, 15 aa, Artificial Sequence
  Peptide Derived from Human Papillomavirus
QTQLCLIGCKPPIGE

SEQ ID NO: 46613 - protein, 15 aa, Artificial Sequence
  Peptide Derived from Human Papillomavirus
QVTFIYILVITCYEN

SEQ ID NO: 46614 - protein, 15 aa, Artificial Sequence
  Peptide Derived from Human Papillomavirus
QYRVFRIHLPDPNKF

SEQ ID NO: 46615 - protein, 15 aa, Artificial Sequence
  Peptide Derived from Human Papillomavirus
REQMFVRHLFNRAGA

SEQ ID NO: 46616 - protein, 15 aa, Artificial Sequence
  Peptide Derived from Human Papillomavirus
RHLFNRAGAVGENVP

SEQ ID NO: 46617 - protein, 15 aa, Artificial Sequence
  Peptide Derived from Human Papillomavirus
RKFLLQAGLKAKPKF

SEQ ID NO: 46618 - protein, 15 aa, Artificial Sequence
  Peptide Derived from Human Papillomavirus
RLVWACVGVEVGRGQ

SEQ ID NO: 46619 - protein, 15 aa, Artificial Sequence
  Peptide Derived from Human Papillomavirus
SADLDQFPLGRKFLL

SEQ ID NO: 46620 - protein, 15 aa, Artificial Sequence
  Peptide Derived from Human Papillomavirus
SGSMVTSDAQIFNKP

SEQ ID NO: 46621 - protein, 15 aa, Artificial Sequence
  Peptide Derived from Human Papillomavirus
SLWLPSEATVYLPPV

SEQ ID NO: 46622 - protein, 15 aa, Artificial Sequence
  Peptide Derived from Human Papillomavirus
SMDYKQTQLCLIGCK

SEQ ID NO: 46623 - protein, 15 aa, Artificial Sequence
  Peptide Derived from Human Papillomavirus
SRLLAVGHPYFPIKK

SEQ ID NO: 46624 - protein, 15 aa, Artificial Sequence
  Peptide Derived from Human Papillomavirus
SSNYFPTPSGSMVTS

SEQ ID NO: 46625 - protein, 15 aa, Artificial Sequence
  Peptide Derived from Human Papillomavirus
STNMSLCAAISTSET

SEQ ID NO: 46626 - protein, 15 aa, Artificial Sequence
  Peptide Derived from Human Papillomavirus
TFIYILVITCYENDV

SEQ ID NO: 46627 - protein, 15 aa, Artificial Sequence
  Peptide Derived from Human Papillomavirus
TNIYYHAGTSRLLAV

SEQ ID NO: 46628 - protein, 15 aa, Artificial Sequence
  Peptide Derived from Human Papillomavirus
TQRLVWACVGVEVGR

SEQ ID NO: 46629 - protein, 15 aa, Artificial Sequence
  Peptide Derived from Human Papillomavirus
TVYLPPVPVSKVVST

SEQ ID NO: 46630 - protein, 15 aa, Artificial Sequence
  Peptide Derived from Human Papillomavirus
TYRFVTSQAIACQKH

SEQ ID NO: 46631 - protein, 15 aa, Artificial Sequence
  Peptide Derived from Human Papillomavirus
VFRIHLPDPNKFGFP

SEQ ID NO: 46632 - protein, 15 aa, Artificial Sequence
  Peptide Derived from Human Papillomavirus
VTFIYILVITCYEND

SEQ ID NO: 46633 - protein, 15 aa, Artificial Sequence
  Peptide Derived from Human Papillomavirus
VTVVDTTRSTNMSLC

SEQ ID NO: 46634 - protein, 15 aa, Artificial Sequence
  Peptide Derived from Human Papillomavirus
VYHIFFQMSLWLPSE

SEQ ID NO: 46635 - protein, 15 aa, Artificial Sequence
  Peptide Derived from Human Papillomavirus
YHIFFQMSLWLPSEA

SEQ ID NO: 46636 - protein, 15 aa, Artificial Sequence
  Peptide Derived from Human Papillomavirus
YPDYIKMVSEPYGDS

SEQ ID NO: 46637 - protein, 15 aa, Artificial Sequence
  Peptide Derived from Human Papillomavirus
YRFVTSQAIACQKHT

SEQ ID NO: 46638 - protein, 15 aa, Artificial Sequence
  Peptide Derived from Human Papillomavirus
YRVFRIHLPDPNKFG

SEQ ID NO: 46639 - protein, 15 aa, Artificial Sequence
  Peptide Derived from Human Papillomavirus
  VARIANT (1)..(3): Xaa= Any amino acid
XXXMRHKRSAKRTKR

SEQ ID NO: 46640 - protein, 15 aa, Artificial Sequence
  Peptide Derived from Human Papillomavirus
ADDFITDTSTTPVPS

SEQ ID NO: 46641 - protein, 15 aa, Artificial Sequence
  Peptide Derived from Human Papillomavirus
ADQILQYGSMGVFFG

SEQ ID NO: 46642 - protein, 15 aa, Artificial Sequence
  Peptide Derived from Human Papillomavirus
AEEIELQTITPSTYT

SEQ ID NO: 46643 - protein, 15 aa, Artificial Sequence
  Peptide Derived from Human Papillomavirus
AGDFYLHPSYYMLRK

SEQ ID NO: 46644 - protein, 15 aa, Artificial Sequence
  Peptide Derived from Human Papillomavirus
APSLIPIVPGSPQYT

SEQ ID NO: 46645 - protein, 15 aa, Artificial Sequence
  Peptide Derived from Human Papillomavirus
DDFITDTSTTPVPSV

SEQ ID NO: 46646 - protein, 15 aa, Artificial Sequence
  Peptide Derived from Human Papillomavirus
DPAFITTPTKLITYD

SEQ ID NO: 46647 - protein, 15 aa, Artificial Sequence
  Peptide Derived from Human Papillomavirus
DPDFLDIVALHRPAL

SEQ ID NO: 46648 - protein, 15 aa, Artificial Sequence
  Peptide Derived from Human Papillomavirus
DPSVLQPPTPAETGG

SEQ ID NO: 46649 - protein, 15 aa, Artificial Sequence
  Peptide Derived from Human Papillomavirus
DQILQYGSMGVFFGG

SEQ ID NO: 46650 - protein, 15 aa, Artificial Sequence
  Peptide Derived from Human Papillomavirus
DTFIVSTNPNTVTSS

SEQ ID NO: 46651 - protein, 15 aa, Artificial Sequence
  Peptide Derived from Human Papillomavirus
EIELQTITPSTYTTT

SEQ ID NO: 46652 - protein, 15 aa, Artificial Sequence
  Peptide Derived from Human Papillomavirus
EIPMDTFIVSTNPNT

SEQ ID NO: 46653 - protein, 15 aa, Artificial Sequence
  Peptide Derived from Human Papillomavirus
ETSFIDAGAPTSVPS

SEQ ID NO: 46654 - protein, 15 aa, Artificial Sequence
  Peptide Derived from Human Papillomavirus
GGAYNIPLVSGPDIP

SEQ ID NO: 46655 - protein, 15 aa, Artificial Sequence
  Peptide Derived from Human Papillomavirus
GGHFTLSSSTISTHN

SEQ ID NO: 46656 - protein, 15 aa, Artificial Sequence
  Peptide Derived from Human Papillomavirus
GKTIADQILQYGSMG

SEQ ID NO: 46657 - protein, 15 aa, Artificial Sequence
  Peptide Derived from Human Papillomavirus
GPDIPINITDQAPSL

SEQ ID NO: 46658 - protein, 15 aa, Artificial Sequence
  Peptide Derived from Human Papillomavirus
GVFFGGLGIGTGSGT

SEQ ID NO: 46659 - protein, 15 aa, Artificial Sequence
  Peptide Derived from Human Papillomavirus
HFTLSSSTISTHNYE

SEQ ID NO: 46660 - protein, 15 aa, Artificial Sequence
  Peptide Derived from Human Papillomavirus
HYYYDFSTIDSAEEI

SEQ ID NO: 46661 - protein, 15 aa, Artificial Sequence
  Peptide Derived from Human Papillomavirus
ILDINNTVTTVTTHN

SEQ ID NO: 46662 - protein, 15 aa, Artificial Sequence
  Peptide Derived from Human Papillomavirus
ILQYGSMGVFFGGLG

SEQ ID NO: 46663 - protein, 15 aa, Artificial Sequence
  Peptide Derived from Human Papillomavirus
IPKVEGKTIADQILQ

SEQ ID NO: 46664 - protein, 15 aa, Artificial Sequence
  Peptide Derived from Human Papillomavirus
IPLVSGPDIPINITD

SEQ ID NO: 46665 - protein, 15 aa, Artificial Sequence
  Peptide Derived from Human Papillomavirus
IVALHRPALTSRRTG

SEQ ID NO: 46666 - protein, 15 aa, Artificial Sequence
  Peptide Derived from Human Papillomavirus
IVSLVEETSFIDAGA

SEQ ID NO: 46667 - protein, 15 aa, Artificial Sequence
  Peptide Derived from Human Papillomavirus
KVHYYYDFSTIDSAE

SEQ ID NO: 46668 - protein, 15 aa, Artificial Sequence
  Peptide Derived from Human Papillomavirus
LAPVRPPLTVDPVGP

SEQ ID NO: 46669 - protein, 15 aa, Artificial Sequence
  Peptide Derived from Human Papillomavirus
LDIVALHRPALTSRR

SEQ ID NO: 46670 - protein, 15 aa, Artificial Sequence
  Peptide Derived from Human Papillomavirus
LIPIVPGSPQYTIIA

SEQ ID NO: 46671 - protein, 12 aa, Artificial Sequence
  Peptide Derived from Human Papillomavirus
LPYFFSDVSLAA

SEQ ID NO: 46672 - protein, 15 aa, Artificial Sequence
  Peptide Derived from Human Papillomavirus
LSGYIPANTTIPFGG

SEQ ID NO: 46673 - protein, 15 aa, Artificial Sequence
  Peptide Derived from Human Papillomavirus
NNGLYDIYADDFITD

SEQ ID NO: 46674 - protein, 15 aa, Artificial Sequence
  Peptide Derived from Human Papillomavirus
NNTVTTVTTHNNPTF

SEQ ID NO: 46675 - protein, 15 aa, Artificial Sequence
  Peptide Derived from Human Papillomavirus
NPAYEGIDVDNTLYF

SEQ ID NO: 46676 - protein, 15 aa, Artificial Sequence
  Peptide Derived from Human Papillomavirus
NPTFTDPSVLQPPTP

SEQ ID NO: 46677 - protein, 15 aa, Artificial Sequence
  Peptide Derived from Human Papillomavirus
NTTIPFGGAYNIPLV

SEQ ID NO: 46678 - protein, 15 aa, Artificial Sequence
  Peptide Derived from Human Papillomavirus
PAILDINNTVTTVTT

SEQ ID NO: 46679 - protein, 15 aa, Artificial Sequence
  Peptide Derived from Human Papillomavirus
PDFLDIVALHRPALT

SEQ ID NO: 46680 - protein, 15 aa, Artificial Sequence
  Peptide Derived from Human Papillomavirus
PINITDQAPSLIPIV

SEQ ID NO: 46681 - protein, 15 aa, Artificial Sequence
  Peptide Derived from Human Papillomavirus
PLTVDPVGPSDPSIV

SEQ ID NO: 46682 - protein, 15 aa, Artificial Sequence
  Peptide Derived from Human Papillomavirus
PNTVTSSTPIPGSRP

SEQ ID NO: 46683 - protein, 15 aa, Artificial Sequence
  Peptide Derived from Human Papillomavirus
PPDVSGFSITTSTDT

SEQ ID NO: 46684 - protein, 15 aa, Artificial Sequence
  Peptide Derived from Human Papillomavirus
PSVLQPPTPAETGGH

SEQ ID NO: 46685 - protein, 15 aa, Artificial Sequence
  Peptide Derived from Human Papillomavirus
PTSVPSIPPDVSGFS

SEQ ID NO: 46686 - protein, 15 aa, Artificial Sequence
  Peptide Derived from Human Papillomavirus
RKRLPYFFSDVSLAA

SEQ ID NO: 46687 - protein, 15 aa, Artificial Sequence
  Peptide Derived from Human Papillomavirus
RLGLYSRTTQQVKVV

SEQ ID NO: 46688 - protein, 13 aa, Artificial Sequence
  Peptide Derived from Human Papillomavirus
RLPYFFSDVSLAA

SEQ ID NO: 46689 - protein, 15 aa, Artificial Sequence
  Peptide Derived from Human Papillomavirus
RPALTSRRTGIRYSR

SEQ ID NO: 46690 - protein, 15 aa, Artificial Sequence
  Peptide Derived from Human Papillomavirus
RPPLTVDPVGPSDPS

SEQ ID NO: 46691 - protein, 15 aa, Artificial Sequence
  Peptide Derived from Human Papillomavirus
RTGIRYSRIGNKQTL

SEQ ID NO: 46692 - protein, 15 aa, Artificial Sequence
  Peptide Derived from Human Papillomavirus
RTGYIPLGTRPPTAT

SEQ ID NO: 46693 - protein, 15 aa, Artificial Sequence
  Peptide Derived from Human Papillomavirus
SGYIPANTTIPFGGA

SEQ ID NO: 46694 - protein, 15 aa, Artificial Sequence
  Peptide Derived from Human Papillomavirus
SMGVFFGGLGIGTGS

SEQ ID NO: 46695 - protein, 15 aa, Artificial Sequence
  Peptide Derived from Human Papillomavirus
SRPVARLGLYSRTTQ

SEQ ID NO: 46696 - protein, 15 aa, Artificial Sequence
  Peptide Derived from Human Papillomavirus
STPIPGSRPVARLGL

SEQ ID NO: 46697 - protein, 15 aa, Artificial Sequence
  Peptide Derived from Human Papillomavirus
STSLSGYIPANTTIP

SEQ ID NO: 46698 - protein, 15 aa, Artificial Sequence
  Peptide Derived from Human Papillomavirus
TDTLAPVRPPLTVDP

SEQ ID NO: 46699 - protein, 15 aa, Artificial Sequence
  Peptide Derived from Human Papillomavirus
THNYEEIPMDTFIVS

SEQ ID NO: 46700 - protein, 15 aa, Artificial Sequence
  Peptide Derived from Human Papillomavirus
TKLITYDNPAYEGID

SEQ ID NO: 46701 - protein, 15 aa, Artificial Sequence
  Peptide Derived from Human Papillomavirus
TQQVKVVDPAFITTP

SEQ ID NO: 46702 - protein, 15 aa, Artificial Sequence
  Peptide Derived from Human Papillomavirus
TSFIDAGAPTSVPSI

SEQ ID NO: 46703 - protein, 15 aa, Artificial Sequence
  Peptide Derived from Human Papillomavirus
TTPVPSVPSTSLSGY

SEQ ID NO: 46704 - protein, 15 aa, Artificial Sequence
  Peptide Derived from Human Papillomavirus
VDPVGPSDPSIVSLV

SEQ ID NO: 46705 - protein, 15 aa, Artificial Sequence
  Peptide Derived from Human Papillomavirus
VHYYYDFSTIDSAEE

SEQ ID NO: 46706 - protein, 15 aa, Artificial Sequence
  Peptide Derived from Human Papillomavirus
VKVVDPAFITTPTKL

SEQ ID NO: 46707 - protein, 15 aa, Artificial Sequence
  Peptide Derived from Human Papillomavirus
VPSIPPDVSGFSITT

SEQ ID NO: 46708 - protein, 15 aa, Artificial Sequence
  Peptide Derived from Human Papillomavirus
VPSVPSTSLSGYIPA

SEQ ID NO: 46709 - protein, 15 aa, Artificial Sequence
  Peptide Derived from Human Papillomavirus
VSGFSITTSTDTTPA

SEQ ID NO: 46710 - protein, 15 aa, Artificial Sequence
  Peptide Derived from Human Papillomavirus
YDIYADDFITDTSTT

SEQ ID NO: 46711 - protein, 15 aa, Artificial Sequence
  Peptide Derived from Human Papillomavirus
YEGIDVDNTLYFSSN

SEQ ID NO: 46712 - protein, 15 aa, Artificial Sequence
  Peptide Derived from Human Papillomavirus
YIPLGTRPPTATDTL

SEQ ID NO: 46713 - protein, 15 aa, Artificial Sequence
  Peptide Derived from Human Papillomavirus
YSRIGNKQTLRTRSG

SEQ ID NO: 46714 - protein, 15 aa, Artificial Sequence
  Peptide Derived from Human Papillomavirus
YYDFSTIDSAEEIEL

SEQ ID NO: 46715 - protein, 15 aa, Artificial Sequence
  Peptide Derived from Human Papillomavirus
AAAFLKSNCQAKYLK

SEQ ID NO: 46716 - protein, 15 aa, Artificial Sequence
  Peptide Derived from Human Papillomavirus
AKYLKDCATMCKHYR

SEQ ID NO: 46717 - protein, 15 aa, Artificial Sequence
  Peptide Derived from Human Papillomavirus
ALYWYRTGISNISEV

SEQ ID NO: 46718 - protein, 15 aa, Artificial Sequence
  Peptide Derived from Human Papillomavirus
CMLIQPPKLRSSVAA

SEQ ID NO: 46719 - protein, 15 aa, Artificial Sequence
  Peptide Derived from Human Papillomavirus
CNGWFYVQAIVDKKT

SEQ ID NO: 46720 - protein, 15 aa, Artificial Sequence
  Peptide Derived from Human Papillomavirus
CSEVEATQIQVTTNG

SEQ ID NO: 46721 - protein, 15 aa, Artificial Sequence
  Peptide Derived from Human Papillomavirus
CWTYFDTYMRNALDG

SEQ ID NO: 46722 - protein, 15 aa, Artificial Sequence
  Peptide Derived from Human Papillomavirus
DCKWGVLILALLRYK

SEQ ID NO: 46723 - protein, 15 aa, Artificial Sequence
  Peptide Derived from Human Papillomavirus
DMAFEYALLADSNSN

SEQ ID NO: 46724 - protein, 15 aa, Artificial Sequence
  Peptide Derived from Human Papillomavirus
DNRWPYLESRITVFE

SEQ ID NO: 46725 - protein, 15 aa, Artificial Sequence
  Peptide Derived from Human Papillomavirus
DSGYGCSEVEATQIQ

SEQ ID NO: 46726 - protein, 15 aa, Artificial Sequence
  Peptide Derived from Human Papillomavirus
DSNFDLSEMVQWAFD

SEQ ID NO: 46727 - protein, 15 aa, Artificial Sequence
  Peptide Derived from Human Papillomavirus
ERTWSRLDLHEEEED

SEQ ID NO: 46728 - protein, 15 aa, Artificial Sequence
  Peptide Derived from Human Papillomavirus
ESDMAFEYALLADSN

SEQ ID NO: 46729 - protein, 15 aa, Artificial Sequence
  Peptide Derived from Human Papillomavirus
ETCMLIQPPKLRSSV

SEQ ID NO: 46730 - protein, 15 aa, Artificial Sequence
  Peptide Derived from Human Papillomavirus
FDTYMRNALDGNPIS

SEQ ID NO: 46731 - protein, 15 aa, Artificial Sequence
  Peptide Derived from Human Papillomavirus
FIHFIQGAVISFVNS

SEQ ID NO: 46732 - protein, 15 aa, Artificial Sequence
  Peptide Derived from Human Papillomavirus
FILYAHIQCLDCKWG

SEQ ID NO: 46733 - protein, 15 aa, Artificial Sequence
  Peptide Derived from Human Papillomavirus
FKTLIQPFILYAHIQ

SEQ ID NO: 46734 - protein, 15 aa, Artificial Sequence
  Peptide Derived from Human Papillomavirus
GAVISFVNSTSHFWL

SEQ ID NO: 46735 - protein, 15 aa, Artificial Sequence
  Peptide Derived from Human Papillomavirus
GGNVCSGGSTEAIDN

SEQ ID NO: 46736 - protein, 15 aa, Artificial Sequence
  Peptide Derived from Human Papillomavirus
GNPFGTFKLRAGQNH

SEQ ID NO: 46737 - protein, 15 aa, Artificial Sequence
  Peptide Derived from Human Papillomavirus
GWFYVQAIVDKKTGD

SEQ ID NO: 46738 - protein, 15 aa, Artificial Sequence
  Peptide Derived from Human Papillomavirus
HKPLIQLKCPPILLT

SEQ ID NO: 46739 - protein, 15 aa, Artificial Sequence
  Peptide Derived from Human Papillomavirus
IEFITFLGALKSFLK

SEQ ID NO: 46740 - protein, 15 aa, Artificial Sequence
  Peptide Derived from Human Papillomavirus
IENVNPQCTIAQLKD

SEQ ID NO: 46741 - protein, 15 aa, Artificial Sequence
  Peptide Derived from Human Papillomavirus
IFGVNPTIAEGFKTL

SEQ ID NO: 46742 - protein, 15 aa, Artificial Sequence
  Peptide Derived from Human Papillomavirus
IHFIQGAVISFVNST

SEQ ID NO: 46743 - protein, 15 aa, Artificial Sequence
  Peptide Derived from Human Papillomavirus
ILALLRYKCGKSRLT

SEQ ID NO: 46744 - protein, 15 aa, Artificial Sequence
  Peptide Derived from Human Papillomavirus
ISEVMGDTPEWIQRL

SEQ ID NO: 46745 - protein, 15 aa, Artificial Sequence
  Peptide Derived from Human Papillomavirus
ITFLGALKSFLKGTP

SEQ ID NO: 46746 - protein, 15 aa, Artificial Sequence
  Peptide Derived from Human Papillomavirus
ITVFEFPNAFPFDKN

SEQ ID NO: 46747 - protein, 15 aa, Artificial Sequence
  Peptide Derived from Human Papillomavirus
KCFFERTWSRLDLHE

SEQ ID NO: 46748 - protein, 15 aa, Artificial Sequence
  Peptide Derived from Human Papillomavirus
KDTYGLSFTDLVRNF

SEQ ID NO: 46749 - protein, 15 aa, Artificial Sequence
  Peptide Derived from Human Papillomavirus
KNCLVFCGPANTGKS

SEQ ID NO: 46750 - protein, 15 aa, Artificial Sequence
  Peptide Derived from Human Papillomavirus
KPLIQLKCPPILLTT

SEQ ID NO: 46751 - protein, 15 aa, Artificial Sequence
  Peptide Derived from Human Papillomavirus
KRKFAGGSTENSPLG

SEQ ID NO: 46752 - protein, 15 aa, Artificial Sequence
  Peptide Derived from Human Papillomavirus
KSYFGMSFIHFIQGA

SEQ ID NO: 46753 - protein, 15 aa, Artificial Sequence
  Peptide Derived from Human Papillomavirus
KTLIQPFILYAHIQC

SEQ ID NO: 46754 - protein, 15 aa, Artificial Sequence
  Peptide Derived from Human Papillomavirus
KVAMLDDATTTCWTY

SEQ ID NO: 46755 - protein, 15 aa, Artificial Sequence
  Peptide Derived from Human Papillomavirus
KWGVLILALLRYKCG

SEQ ID NO: 46756 - protein, 15 aa, Artificial Sequence
  Peptide Derived from Human Papillomavirus
LEPLTDTKVAMLDDA

SEQ ID NO: 46757 - protein, 15 aa, Artificial Sequence
  Peptide Derived from Human Papillomavirus
LHVLKRKFAGGSTEN

SEQ ID NO: 46758 - protein, 15 aa, Artificial Sequence
  Peptide Derived from Human Papillomavirus
LIQLKCPPILLTTNI

SEQ ID NO: 46759 - protein, 15 aa, Artificial Sequence
  Peptide Derived from Human Papillomavirus
LKSFLKGTPKKNCLV

SEQ ID NO: 46760 - protein, 15 aa, Artificial Sequence
  Peptide Derived from Human Papillomavirus
LLHVPETCMLIQPPK

SEQ ID NO: 46761 - protein, 15 aa, Artificial Sequence
  Peptide Derived from Human Papillomavirus
LLRYKCGKSRLTVAK

SEQ ID NO: 46762 - protein, 15 aa, Artificial Sequence
  Peptide Derived from Human Papillomavirus
LYWYRTGISNISEVM

SEQ ID NO: 46763 - protein, 15 aa, Artificial Sequence
  Peptide Derived from Human Papillomavirus
MSQWIRFRCSKIDEG

SEQ ID NO: 46764 - protein, 15 aa, Artificial Sequence
  Peptide Derived from Human Papillomavirus
NCLVFCGPANTGKSY

SEQ ID NO: 46765 - protein, 15 aa, Artificial Sequence
  Peptide Derived from Human Papillomavirus
NGWFYVQAIVDKKTG

SEQ ID NO: 46766 - protein, 15 aa, Artificial Sequence
  Peptide Derived from Human Papillomavirus
NSNIENVNPQCTIAQ

SEQ ID NO: 46767 - protein, 15 aa, Artificial Sequence
  Peptide Derived from Human Papillomavirus
PEWIQRLTIIQHGID

SEQ ID NO: 46768 - protein, 15 aa, Artificial Sequence
  Peptide Derived from Human Papillomavirus
PPILLTTNIHPAKDN

SEQ ID NO: 46769 - protein, 15 aa, Artificial Sequence
  Peptide Derived from Human Papillomavirus
PPKLRSSVAALYWYR

SEQ ID NO: 46770 - protein, 15 aa, Artificial Sequence
  Peptide Derived from Human Papillomavirus
QAELETAQALFHAQE

SEQ ID NO: 46771 - protein, 15 aa, Artificial Sequence
  Peptide Derived from Human Papillomavirus
QAKYLKDCATMCKHY

SEQ ID NO: 46772 - protein, 15 aa, Artificial Sequence
  Peptide Derived from Human Papillomavirus
QALFHAQEVHNDAQV

SEQ ID NO: 46773 - protein, 15 aa, Artificial Sequence
  Peptide Derived from Human Papillomavirus
QPFILYAHIQCLDCK

SEQ ID NO: 46774 - protein, 15 aa, Artificial Sequence
  Peptide Derived from Human Papillomavirus
QWAFDNELTDESDMA

SEQ ID NO: 46775 - protein, 15 aa, Artificial Sequence
  Peptide Derived from Human Papillomavirus
RLEVDTELSPRLQEI

SEQ ID NO: 46776 - protein, 15 aa, Artificial Sequence
  Peptide Derived from Human Papillomavirus
RLTIIQHGIDDSNFD

SEQ ID NO: 46777 - protein, 15 aa, Artificial Sequence
  Peptide Derived from Human Papillomavirus
RLTVAKGLSTLLHVP

SEQ ID NO: 46778 - protein, 15 aa, Artificial Sequence
  Peptide Derived from Human Papillomavirus
RNALDGNPISIDRKH

SEQ ID NO: 46779 - protein, 15 aa, Artificial Sequence
  Peptide Derived from Human Papillomavirus
RRLFTISDSGYGCSE

SEQ ID NO: 46780 - protein, 15 aa, Artificial Sequence
  Peptide Derived from Human Papillomavirus
RWPYLESRITVFEFP

SEQ ID NO: 46781 - protein, 15 aa, Artificial Sequence
  Peptide Derived from Human Papillomavirus
SDMVDFIDTQGTFCE

SEQ ID NO: 46782 - protein, 15 aa, Artificial Sequence
  Peptide Derived from Human Papillomavirus
SHFWLEPLTDTKVAM

SEQ ID NO: 46783 - protein, 15 aa, Artificial Sequence
  Peptide Derived from Human Papillomavirus
SPRLQEISLNSGQKK

SEQ ID NO: 46784 - protein, 15 aa, Artificial Sequence
  Peptide Derived from Human Papillomavirus
SQWIRFRCSKIDEGG

SEQ ID NO: 46785 - protein, 15 aa, Artificial Sequence
  Peptide Derived from Human Papillomavirus
STLLHVPETCMLIQP

SEQ ID NO: 46786 - protein, 15 aa, Artificial Sequence
  Peptide Derived from Human Papillomavirus
TAIFGVNPTIAEGFK

SEQ ID NO: 46787 - protein, 15 aa, Artificial Sequence
  Peptide Derived from Human Papillomavirus
TDLVRNFKSDKTTCT

SEQ ID NO: 46788 - protein, 15 aa, Artificial Sequence
  Peptide Derived from Human Papillomavirus
TEAIDNGGTEGNNSS

SEQ ID NO: 46789 - protein, 15 aa, Artificial Sequence
  Peptide Derived from Human Papillomavirus
TPEWIQRLTIIQHGI

SEQ ID NO: 46790 - protein, 15 aa, Artificial Sequence
  Peptide Derived from Human Papillomavirus
TSHFWLEPLTDTKVA

SEQ ID NO: 46791 - protein, 15 aa, Artificial Sequence
  Peptide Derived from Human Papillomavirus
TTCWTYFDTYMRNAL

SEQ ID NO: 46792 - protein, 15 aa, Artificial Sequence
  Peptide Derived from Human Papillomavirus
TYGLSFTDLVRNFKS

SEQ ID NO: 46793 - protein, 15 aa, Artificial Sequence
  Peptide Derived from Human Papillomavirus
VAALYWYRTGISNIS

SEQ ID NO: 46794 - protein, 15 aa, Artificial Sequence
  Peptide Derived from Human Papillomavirus
VAMLDDATTTCWTYF

SEQ ID NO: 46795 - protein, 15 aa, Artificial Sequence
  Peptide Derived from Human Papillomavirus
VDFIDTQGTFCEQAE

SEQ ID NO: 46796 - protein, 15 aa, Artificial Sequence
  Peptide Derived from Human Papillomavirus
VFEFPNAFPFDKNGN

SEQ ID NO: 46797 - protein, 15 aa, Artificial Sequence
  Peptide Derived from Human Papillomavirus
VISFVNSTSHFWLEP

SEQ ID NO: 46798 - protein, 15 aa, Artificial Sequence
  Peptide Derived from Human Papillomavirus
VQAIVDKKTGDVISD

SEQ ID NO: 46799 - protein, 15 aa, Artificial Sequence
  Peptide Derived from Human Papillomavirus
VQFLRYQQIEFITFL

SEQ ID NO: 46800 - protein, 15 aa, Artificial Sequence
  Peptide Derived from Human Papillomavirus
VRNFKSDKTTCTDWV

SEQ ID NO: 46801 - protein, 15 aa, Artificial Sequence
  Peptide Derived from Human Papillomavirus
VTAIFGVNPTIAEGF

SEQ ID NO: 46802 - protein, 15 aa, Artificial Sequence
  Peptide Derived from Human Papillomavirus
WGVLILALLRYKCGK

SEQ ID NO: 46803 - protein, 15 aa, Artificial Sequence
  Peptide Derived from Human Papillomavirus
WIRFRCSKIDEGGDW

SEQ ID NO: 46804 - protein, 15 aa, Artificial Sequence
  Peptide Derived from Human Papillomavirus
WPYLESRITVFEFPN

SEQ ID NO: 46805 - protein, 15 aa, Artificial Sequence
  Peptide Derived from Human Papillomavirus
YAHIQCLDCKWGVLI

SEQ ID NO: 46806 - protein, 15 aa, Artificial Sequence
  Peptide Derived from Human Papillomavirus
YALLADSNSNAAAFL

SEQ ID NO: 46807 - protein, 15 aa, Artificial Sequence
  Peptide Derived from Human Papillomavirus
AGTWDKTATCVSHRG

SEQ ID NO: 46808 - protein, 15 aa, Artificial Sequence
  Peptide Derived from Human Papillomavirus
AKTYGQTSAATRPGH

SEQ ID NO: 46809 - protein, 15 aa, Artificial Sequence
  Peptide Derived from Human Papillomavirus
ATCVSHRGLYYVKEG

SEQ ID NO: 46810 - protein, 15 aa, Artificial Sequence
  Peptide Derived from Human Papillomavirus
AYNISKSKAHKAIEL

SEQ ID NO: 46811 - protein, 15 aa, Artificial Sequence
  Peptide Derived from Human Papillomavirus
CEELWNTEPTHCFKK

SEQ ID NO: 46812 - protein, 15 aa, Artificial Sequence
  Peptide Derived from Human Papillomavirus
CEKYGNTGTWEVHFG

SEQ ID NO: 46813 - protein, 15 aa, Artificial Sequence
  Peptide Derived from Human Papillomavirus
CMTYVAWDSVYYMTD

SEQ ID NO: 46814 - protein, 15 aa, Artificial Sequence
  Peptide Derived from Human Papillomavirus
DDTVSATQLVKQLQH

SEQ ID NO: 46815 - protein, 15 aa, Artificial Sequence
  Peptide Derived from Human Papillomavirus
DSQIQYWQLIRWENA

SEQ ID NO: 46816 - protein, 15 aa, Artificial Sequence
  Peptide Derived from Human Papillomavirus
DSVYYMTDAGTWDKT

SEQ ID NO: 46817 - protein, 15 aa, Artificial Sequence
  Peptide Derived from Human Papillomavirus
EELWNTEPTHCFKKG

SEQ ID NO: 46818 - protein, 15 aa, Artificial Sequence
  Peptide Derived from Human Papillomavirus
ELQMALQGLAQSRYK

SEQ ID NO: 46819 - protein, 15 aa, Artificial Sequence
  Peptide Derived from Human Papillomavirus
EVHFGNNVIDCNDSM

SEQ ID NO: 46820 - protein, 15 aa, Artificial Sequence
  Peptide Derived from Human Papillomavirus
HKAIELQMALQGLAQ

SEQ ID NO: 46821 - protein, 15 aa, Artificial Sequence
  Peptide Derived from Human Papillomavirus
HQVVPAYNISKSKAH

SEQ ID NO: 46822 - protein, 15 aa, Artificial Sequence
  Peptide Derived from Human Papillomavirus
IQTLNHQVVPAYNIS

SEQ ID NO: 46823 - protein, 15 aa, Artificial Sequence
  Peptide Derived from Human Papillomavirus
KEGYNTFYIEFKSEC

SEQ ID NO: 46824 - protein, 15 aa, Artificial Sequence
  Peptide Derived from Human Papillomavirus
KETLSERLSCVQDKI

SEQ ID NO: 46825 - protein, 15 aa, Artificial Sequence
  Peptide Derived from Human Papillomavirus
LNTVAIPDSVQILVG

SEQ ID NO: 46826 - protein, 15 aa, Artificial Sequence
  Peptide Derived from Human Papillomavirus
LSCVQDKIIDHYEND

SEQ ID NO: 46827 - protein, 15 aa, Artificial Sequence
  Peptide Derived from Human Papillomavirus
MTYVAWDSVYYMTDA

SEQ ID NO: 46828 - protein, 15 aa, Artificial Sequence
  Peptide Derived from Human Papillomavirus
NNVIDCNDSMCSTSD

SEQ ID NO: 46829 - protein, 15 aa, Artificial Sequence
  Peptide Derived from Human Papillomavirus
NPLLGAATPTGNNKR

SEQ ID NO: 46830 - protein, 15 aa, Artificial Sequence
  Peptide Derived from Human Papillomavirus
NTFYIEFKSECEKYG

SEQ ID NO: 46831 - protein, 15 aa, Artificial Sequence
  Peptide Derived from Human Papillomavirus
PSPYSSTVSVGTAKT

SEQ ID NO: 46832 - protein, 15 aa, Artificial Sequence
  Peptide Derived from Human Papillomavirus
RRKLCSGNTTPIIHL

SEQ ID NO: 46833 - protein, 15 aa, Artificial Sequence
  Peptide Derived from Human Papillomavirus
RTKFLNTVAIPDSVQ

SEQ ID NO: 46834 - protein, 15 aa, Artificial Sequence
  Peptide Derived from Human Papillomavirus
SDHYRDISSTWHWTG

SEQ ID NO: 46835 - protein, 15 aa, Artificial Sequence
  Peptide Derived from Human Papillomavirus
SSTVSVGTAKTYGQT

SEQ ID NO: 46836 - protein, 15 aa, Artificial Sequence
  Peptide Derived from Human Papillomavirus
SSTWHWTGAGNEKTG

SEQ ID NO: 46837 - protein, 15 aa, Artificial Sequence
  Peptide Derived from Human Papillomavirus
TEDWTLQDTCEELWN

SEQ ID NO: 46838 - protein, 15 aa, Artificial Sequence
  Peptide Derived from Human Papillomavirus
TKFLNTVAIPDSVQI

SEQ ID NO: 46839 - protein, 15 aa, Artificial Sequence
  Peptide Derived from Human Papillomavirus
TVSVGTAKTYGQTSA

SEQ ID NO: 46840 - protein, 15 aa, Artificial Sequence
  Peptide Derived from Human Papillomavirus
VKQLQHTPSPYSSTV

SEQ ID NO: 46841 - protein, 15 aa, Artificial Sequence
  Peptide Derived from Human Papillomavirus
VNPLLGAATPTGNNK

SEQ ID NO: 46842 - protein, 15 aa, Artificial Sequence
  Peptide Derived from Human Papillomavirus
VPAYNISKSKAHKAI

SEQ ID NO: 46843 - protein, 15 aa, Artificial Sequence
  Peptide Derived from Human Papillomavirus
VYYMTDAGTWDKTAT

SEQ ID NO: 46844 - protein, 15 aa, Artificial Sequence
  Peptide Derived from Human Papillomavirus
WQLIRWENAIFFAAR

SEQ ID NO: 46845 - protein, 15 aa, Artificial Sequence
  Peptide Derived from Human Papillomavirus
  VARIANT (1)..(2): Xaa= Any amino acid
XXMLSLIFLFCFCVC

SEQ ID NO: 46846 - protein, 15 aa, Artificial Sequence
  Peptide Derived from Human Papillomavirus
AWVLVFVYIVVITSP

SEQ ID NO: 46847 - protein, 15 aa, Artificial Sequence
  Peptide Derived from Human Papillomavirus
AYAWVLVFVYIVVIT

SEQ ID NO: 46848 - protein, 15 aa, Artificial Sequence
  Peptide Derived from Human Papillomavirus
CCHVPLLPSVCMCAY

SEQ ID NO: 46849 - protein, 15 aa, Artificial Sequence
  Peptide Derived from Human Papillomavirus
CFCVCMYVCCHVPLL

SEQ ID NO: 46850 - protein, 15 aa, Artificial Sequence
  Peptide Derived from Human Papillomavirus
CFLLPMLLLHIHAIL

SEQ ID NO: 46851 - protein, 15 aa, Artificial Sequence
  Peptide Derived from Human Papillomavirus
CMYVCCHVPLLPSVC

SEQ ID NO: 46852 - protein, 15 aa, Artificial Sequence
  Peptide Derived from Human Papillomavirus
FCFLLPMLLLHIHAI

SEQ ID NO: 46853 - protein, 15 aa, Artificial Sequence
  Peptide Derived from Human Papillomavirus
FTVYVFCFLLPMLLL

SEQ ID NO: 46854 - protein, 15 aa, Artificial Sequence
  Peptide Derived from Human Papillomavirus
FVYIVVITSPATAFT

SEQ ID NO: 46855 - protein, 15 aa, Artificial Sequence
  Peptide Derived from Human Papillomavirus
HVPLLPSVCMCAYAW

SEQ ID NO: 46856 - protein, 15 aa, Artificial Sequence
  Peptide Derived from Human Papillomavirus
IFLFCFCVCMYVCCH

SEQ ID NO: 46857 - protein, 15 aa, Artificial Sequence
  Peptide Derived from Human Papillomavirus
IVVITSPATAFTVYV

SEQ ID NO: 46858 - protein, 15 aa, Artificial Sequence
  Peptide Derived from Human Papillomavirus
LIFLFCFCVCMYVCC

SEQ ID NO: 46859 - protein, 15 aa, Artificial Sequence
  Peptide Derived from Human Papillomavirus
LLPMLLLHIHAILSL

SEQ ID NO: 46860 - protein, 15 aa, Artificial Sequence
  Peptide Derived from Human Papillomavirus
LVFVYIVVITSPATA

SEQ ID NO: 46861 - protein, 15 aa, Artificial Sequence
  Peptide Derived from Human Papillomavirus
MCAYAWVLVFVYIVV

SEQ ID NO: 46862 - protein, 13 aa, Artificial Sequence
  Peptide Derived from Human Papillomavirus
MLLLHIHAILSLQ

SEQ ID NO: 46863 - protein, 15 aa, Artificial Sequence
  Peptide Derived from Human Papillomavirus
MLSLIFLFCFCVCMY

SEQ ID NO: 46864 - protein, 14 aa, Artificial Sequence
  Peptide Derived from Human Papillomavirus
PMLLLHIHAILSLQ

SEQ ID NO: 46865 - protein, 15 aa, Artificial Sequence
  Peptide Derived from Human Papillomavirus
SLIFLFCFCVCMYVC

SEQ ID NO: 46866 - protein, 15 aa, Artificial Sequence
  Peptide Derived from Human Papillomavirus
TVYVFCFLLPMLLLH

SEQ ID NO: 46867 - protein, 15 aa, Artificial Sequence
  Peptide Derived from Human Papillomavirus
VCMYVCCHVPLLPSV

SEQ ID NO: 46868 - protein, 15 aa, Artificial Sequence
  Peptide Derived from Human Papillomavirus
VFCFLLPMLLLHIHA

SEQ ID NO: 46869 - protein, 15 aa, Artificial Sequence
  Peptide Derived from Human Papillomavirus
VFVYIVVITSPATAF

SEQ ID NO: 46870 - protein, 15 aa, Artificial Sequence
  Peptide Derived from Human Papillomavirus
VLVFVYIVVITSPAT

SEQ ID NO: 46871 - protein, 15 aa, Artificial Sequence
  Peptide Derived from Human Papillomavirus
VPLLPSVCMCAYAWV

SEQ ID NO: 46872 - protein, 15 aa, Artificial Sequence
  Peptide Derived from Human Papillomavirus
VYIVVITSPATAFTV

SEQ ID NO: 46873 - protein, 15 aa, Artificial Sequence
  Peptide Derived from Human Papillomavirus
VYVFCFLLPMLLLHI

SEQ ID NO: 46874 - protein, 15 aa, Artificial Sequence
  Peptide Derived from Human Papillomavirus
WVLVFVYIVVITSPA

SEQ ID NO: 46875 - protein, 15 aa, Artificial Sequence
  Peptide Derived from Human Papillomavirus
YIVVITSPATAFTVY

SEQ ID NO: 46876 - protein, 15 aa, Artificial Sequence
  Peptide Derived from Human Papillomavirus
DIEITCVYCKTVLEL

SEQ ID NO: 46877 - protein, 15 aa, Artificial Sequence
  Peptide Derived from Human Papillomavirus
DLFVVYRDSIPHAAC

SEQ ID NO: 46878 - protein, 15 aa, Artificial Sequence
  Peptide Derived from Human Papillomavirus
EFAFKDLFVVYRDSI

SEQ ID NO: 46879 - protein, 15 aa, Artificial Sequence
  Peptide Derived from Human Papillomavirus
FVVYRDSIPHAACHK

SEQ ID NO: 46880 - protein, 15 aa, Artificial Sequence
  Peptide Derived from Human Papillomavirus
IRCLRCQKPLNPAEK

SEQ ID NO: 46881 - protein, 15 aa, Artificial Sequence
  Peptide Derived from Human Papillomavirus
ITCVYCKTVLELTEV

SEQ ID NO: 46882 - protein, 15 aa, Artificial Sequence
  Peptide Derived from Human Papillomavirus
KTVLELTEVFEFAFK

SEQ ID NO: 46883 - protein, 15 aa, Artificial Sequence
  Peptide Derived from Human Papillomavirus
LEKLTNTGLYNLLIR

SEQ ID NO: 46884 - protein, 15 aa, Artificial Sequence
  Peptide Derived from Human Papillomavirus
LFVVYRDSIPHAACH

SEQ ID NO: 46885 - protein, 15 aa, Artificial Sequence
  Peptide Derived from Human Papillomavirus
LQDIEITCVYCKTVL

SEQ ID NO: 46886 - protein, 15 aa, Artificial Sequence
  Peptide Derived from Human Papillomavirus
LYNLLIRCLRCQKPL

SEQ ID NO: 46887 - protein, 15 aa, Artificial Sequence
  Peptide Derived from Human Papillomavirus
NLLIRCLRCQKPLNP

SEQ ID NO: 46888 - protein, 15 aa, Artificial Sequence
  Peptide Derived from Human Papillomavirus
NTGLYNLLIRCLRCQ

SEQ ID NO: 46889 - protein, 15 aa, Artificial Sequence
  Peptide Derived from Human Papillomavirus
NTSLQDIEITCVYCK

SEQ ID NO: 46890 - protein, 15 aa, Artificial Sequence
  Peptide Derived from Human Papillomavirus
PYKLPDLCTELNTSL

SEQ ID NO: 46891 - protein, 15 aa, Artificial Sequence
  Peptide Derived from Human Papillomavirus
RDSIPHAACHKCIDF

SEQ ID NO: 46892 - protein, 15 aa, Artificial Sequence
  Peptide Derived from Human Papillomavirus
RRPYKLPDLCTELNT

SEQ ID NO: 46893 - protein, 15 aa, Artificial Sequence
  Peptide Derived from Human Papillomavirus
SDSVYGDTLEKLTNT

SEQ ID NO: 46894 - protein, 15 aa, Artificial Sequence
  Peptide Derived from Human Papillomavirus
TCVYCKTVLELTEVF

SEQ ID NO: 46895 - protein, 15 aa, Artificial Sequence
  Peptide Derived from Human Papillomavirus
VFEFAFKDLFVVYRD

SEQ ID NO: 46896 - protein, 15 aa, Artificial Sequence
  Peptide Derived from Human Papillomavirus
  VARIANT (1)..(3): Xaa= Any amino acid
XXXMHGPKATLQDIV

SEQ ID NO: 46897 - protein, 15 aa, Artificial Sequence
  Peptide Derived from Human Papillomavirus
FQQLFLNTLSFVCPW

SEQ ID NO: 46898 - protein, 15 aa, Artificial Sequence
  Peptide Derived from Human Papillomavirus
HQHLPARRAEPQRHT

SEQ ID NO: 46899 - protein, 15 aa, Artificial Sequence
  Peptide Derived from Human Papillomavirus
IDGVNHQHLPARRAE

SEQ ID NO: 46900 - protein, 15 aa, Artificial Sequence
  Peptide Derived from Human Papillomavirus
IKLVVESSADDLRAF

SEQ ID NO: 46901 - protein, 15 aa, Artificial Sequence
  Peptide Derived from Human Papillomavirus
KATLQDIVLHLEPQN

SEQ ID NO: 46902 - protein, 15 aa, Artificial Sequence
  Peptide Derived from Human Papillomavirus
LNTLSFVCPWCASQQ

SEQ ID NO: 46903 - protein, 15 aa, Artificial Sequence
  Peptide Derived from Human Papillomavirus
LRAFQQLFLNTLSFV

SEQ ID NO: 46904 - protein, 12 aa, Artificial Sequence
  Peptide Derived from Human Papillomavirus
LSFVCPWCASQQ

SEQ ID NO: 46905 - protein, 15 aa, Artificial Sequence
  Peptide Derived from Human Papillomavirus
QDIVLHLEPQNEIPV

SEQ ID NO: 46906 - protein, 15 aa, Artificial Sequence
  Peptide Derived from Human Papillomavirus
QNEIPVDLLCHEQLS

SEQ ID NO: 46907 - protein, 15 aa, Artificial Sequence
  Peptide Derived from Human Papillomavirus
QQLFLNTLSFVCPWC

SEQ ID NO: 46908 - protein, 15 aa, Artificial Sequence
  Peptide Derived from Human Papillomavirus
RHTMLCMCCKCEARI

SEQ ID NO: 46909 - protein, 15 aa, Artificial Sequence
  Peptide Derived from Human Papillomavirus
RIKLVVESSADDLRA

SEQ ID NO: 46910 - protein, 13 aa, Artificial Sequence
  Peptide Derived from Human Papillomavirus
TLSFVCPWCASQQ

SEQ ID NO: 46911 - protein, 15 aa, Artificial Sequence
  Peptide Derived from Human Papillomavirus
VDLLCHEQLSDSEEE

SEQ ID NO: 46912 - protein, 15 aa, Artificial Sequence
  Peptide Derived from Human Papillomavirus
  VARIANT (1)..(1): Xaa= Any amino acid
XMCLYTRVLILHYHL

SEQ ID NO: 46913 - protein, 15 aa, Artificial Sequence
  Peptide Derived from Human Papillomavirus
ADVMSYIHSMNSSIL

SEQ ID NO: 46914 - protein, 15 aa, Artificial Sequence
  Peptide Derived from Human Papillomavirus
AGTMGDTVPQSLYIK

SEQ ID NO: 46915 - protein, 15 aa, Artificial Sequence
  Peptide Derived from Human Papillomavirus
APAIGEHWAKGTACK

SEQ ID NO: 46916 - protein, 15 aa, Artificial Sequence
  Peptide Derived from Human Papillomavirus
AYQYRVFRVQLPDPN

SEQ ID NO: 46917 - protein, 15 aa, Artificial Sequence
  Peptide Derived from Human Papillomavirus
CGHYIILFLRNVNVF

SEQ ID NO: 46918 - protein, 15 aa, Artificial Sequence
  Peptide Derived from Human Papillomavirus
CPPLELKNTVLEDGD

SEQ ID NO: 46919 - protein, 15 aa, Artificial Sequence
  Peptide Derived from Human Papillomavirus
DDYVTPTSIFYHAGS

SEQ ID NO: 46920 - protein, 15 aa, Artificial Sequence
  Peptide Derived from Human Papillomavirus
DLQFIFQLCTITLTA

SEQ ID NO: 46921 - protein, 15 aa, Artificial Sequence
  Peptide Derived from Human Papillomavirus
DNTVYLPPPSVARVV

SEQ ID NO: 46922 - protein, 15 aa, Artificial Sequence
  Peptide Derived from Human Papillomavirus
DTSIYNPETQRLVWA

SEQ ID NO: 46923 - protein, 15 aa, Artificial Sequence
  Peptide Derived from Human Papillomavirus
DWNFGVPPPPTTSLV

SEQ ID NO: 46924 - protein, 15 aa, Artificial Sequence
  Peptide Derived from Human Papillomavirus
EVPLDICQSICKYPD

SEQ ID NO: 46925 - protein, 15 aa, Artificial Sequence
  Peptide Derived from Human Papillomavirus
FFCLRREQLFARHFW

SEQ ID NO: 46926 - protein, 15 aa, Artificial Sequence
  Peptide Derived from Human Papillomavirus
FLQMALWRPSDNTVY

SEQ ID NO: 46927 - protein, 15 aa, Artificial Sequence
  Peptide Derived from Human Papillomavirus
FPIFLQMALWRPSDN

SEQ ID NO: 46928 - protein, 15 aa, Artificial Sequence
  Peptide Derived from Human Papillomavirus
FSTLQDTKCEVPLDI

SEQ ID NO: 46929 - protein, 15 aa, Artificial Sequence
  Peptide Derived from Human Papillomavirus
FVTVVDTTPSTNLTI

SEQ ID NO: 46930 - protein, 15 aa, Artificial Sequence
  Peptide Derived from Human Papillomavirus
GEHWAKGTACKSRPL

SEQ ID NO: 46931 - protein, 15 aa, Artificial Sequence
  Peptide Derived from Human Papillomavirus
GNPYFRVPAGGGNKQ

SEQ ID NO: 46932 - protein, 15 aa, Artificial Sequence
  Peptide Derived from Human Papillomavirus
GPLYHPRPLPLHSIL

SEQ ID NO: 46933 - protein, 15 aa, Artificial Sequence
  Peptide Derived from Human Papillomavirus
GQPLGVGLSGHPFYN

SEQ ID NO: 46934 - protein, 15 aa, Artificial Sequence
  Peptide Derived from Human Papillomavirus
GSCVYSPSPSGSIVT

SEQ ID NO: 46935 - protein, 15 aa, Artificial Sequence
  Peptide Derived from Human Papillomavirus
GVEIGRGQPLGVGLS

SEQ ID NO: 46936 - protein, 15 aa, Artificial Sequence
  Peptide Derived from Human Papillomavirus
HIIICGHYIILFLRN

SEQ ID NO: 46937 - protein, 15 aa, Artificial Sequence
  Peptide Derived from Human Papillomavirus
HNQLFVTVVDTTPST

SEQ ID NO: 46938 - protein, 15 aa, Artificial Sequence
  Peptide Derived from Human Papillomavirus
IFQLCTITLTADVMS

SEQ ID NO: 46939 - protein, 15 aa, Artificial Sequence
  Peptide Derived from Human Papillomavirus
IHSMNSSILEDWNFG

SEQ ID NO: 46940 - protein, 15 aa, Artificial Sequence
  Peptide Derived from Human Papillomavirus
ILFLRNVNVFPIFLQ

SEQ ID NO: 46941 - protein, 15 aa, Artificial Sequence
  Peptide Derived from Human Papillomavirus
ILHYHLLPLYGPLYH

SEQ ID NO: 46942 - protein, 15 aa, Artificial Sequence
  Peptide Derived from Human Papillomavirus
ILVYMVHIIICGHYI

SEQ ID NO: 46943 - protein, 15 aa, Artificial Sequence
  Peptide Derived from Human Papillomavirus
KCEVPLDICQSICKY

SEQ ID NO: 46944 - protein, 15 aa, Artificial Sequence
  Peptide Derived from Human Papillomavirus
KFGLPDTSIYNPETQ

SEQ ID NO: 46945 - protein, 15 aa, Artificial Sequence
  Peptide Derived from Human Papillomavirus
KLKFWNVDLKEKFSL

SEQ ID NO: 46946 - protein, 15 aa, Artificial Sequence
  Peptide Derived from Human Papillomavirus
KQDIPKVSAYQYRVF

SEQ ID NO: 46947 - protein, 15 aa, Artificial Sequence
  Peptide Derived from Human Papillomavirus
LCILGCAPAIGEHWA

SEQ ID NO: 46948 - protein, 15 aa, Artificial Sequence
  Peptide Derived from Human Papillomavirus
LEDWNFGVPPPPTTS

SEQ ID NO: 46949 - protein, 15 aa, Artificial Sequence
  Peptide Derived from Human Papillomavirus
LHSILVYMVHIIICG

SEQ ID NO: 46950 - protein, 15 aa, Artificial Sequence
  Peptide Derived from Human Papillomavirus
LQFIFQLCTITLTAD

SEQ ID NO: 46951 - protein, 15 aa, Artificial Sequence
  Peptide Derived from Human Papillomavirus
LRNVNVFPIFLQMAL

SEQ ID NO: 46952 - protein, 15 aa, Artificial Sequence
  Peptide Derived from Human Papillomavirus
LVYMVHIIICGHYII

SEQ ID NO: 46953 - protein, 15 aa, Artificial Sequence
  Peptide Derived from Human Papillomavirus
MCLYTRVLILHYHLL

SEQ ID NO: 46954 - protein, 15 aa, Artificial Sequence
  Peptide Derived from Human Papillomavirus
MSYIHSMNSSILEDW

SEQ ID NO: 46955 - protein, 15 aa, Artificial Sequence
  Peptide Derived from Human Papillomavirus
NFGVPPPPTTSLVDT

SEQ ID NO: 46956 - protein, 15 aa, Artificial Sequence
  Peptide Derived from Human Papillomavirus
NKPYWLHKAQGHNNG

SEQ ID NO: 46957 - protein, 15 aa, Artificial Sequence
  Peptide Derived from Human Papillomavirus
NTVLEDGDMVDTGYG

SEQ ID NO: 46958 - protein, 15 aa, Artificial Sequence
  Peptide Derived from Human Papillomavirus
NTVYLPPPSVARVVN

SEQ ID NO: 46959 - protein, 15 aa, Artificial Sequence
  Peptide Derived from Human Papillomavirus
NVDLKEKFSLDLDQY

SEQ ID NO: 46960 - protein, 15 aa, Artificial Sequence
  Peptide Derived from Human Papillomavirus
NVNVFPIFLQMALWR

SEQ ID NO: 46961 - protein, 15 aa, Artificial Sequence
  Peptide Derived from Human Papillomavirus
NVSVDYKQTQLCILG

SEQ ID NO: 46962 - protein, 15 aa, Artificial Sequence
  Peptide Derived from Human Papillomavirus
PLDICQSICKYPDYL

SEQ ID NO: 46963 - protein, 15 aa, Artificial Sequence
  Peptide Derived from Human Papillomavirus
PLELKNTVLEDGDMV

SEQ ID NO: 46964 - protein, 15 aa, Artificial Sequence
  Peptide Derived from Human Papillomavirus
PLPLHSILVYMVHII

SEQ ID NO: 46965 - protein, 15 aa, Artificial Sequence
  Peptide Derived from Human Papillomavirus
PNKFGLPDTSIYNPE

SEQ ID NO: 46966 - protein, 15 aa, Artificial Sequence
  Peptide Derived from Human Papillomavirus
PQSLYIKGTGMPASP

SEQ ID NO: 46967 - protein, 15 aa, Artificial Sequence
  Peptide Derived from Human Papillomavirus
PRPLPLHSILVYMVH

SEQ ID NO: 46968 - protein, 15 aa, Artificial Sequence
  Peptide Derived from Human Papillomavirus
QAGLRRKPTIGPRKR

SEQ ID NO: 46969 - protein, 15 aa, Artificial Sequence
  Peptide Derived from Human Papillomavirus
QFIFQLCTITLTADV

SEQ ID NO: 46970 - protein, 15 aa, Artificial Sequence
  Peptide Derived from Human Papillomavirus
QLCILGCAPAIGEHW

SEQ ID NO: 46971 - protein, 15 aa, Artificial Sequence
  Peptide Derived from Human Papillomavirus
QLFVTVVDTTPSTNL

SEQ ID NO: 46972 - protein, 15 aa, Artificial Sequence
  Peptide Derived from Human Papillomavirus
QTQLCILGCAPAIGE

SEQ ID NO: 46973 - protein, 15 aa, Artificial Sequence
  Peptide Derived from Human Papillomavirus
QYPLGRKFLVQAGLR

SEQ ID NO: 46974 - protein, 15 aa, Artificial Sequence
  Peptide Derived from Human Papillomavirus
QYRVFRVQLPDPNKF

SEQ ID NO: 46975 - protein, 15 aa, Artificial Sequence
  Peptide Derived from Human Papillomavirus
RHFWNRAGTMGDTVP

SEQ ID NO: 46976 - protein, 15 aa, Artificial Sequence
  Peptide Derived from Human Papillomavirus
RKFLVQAGLRRKPTI

SEQ ID NO: 46977 - protein, 15 aa, Artificial Sequence
  Peptide Derived from Human Papillomavirus
RLVWACAGVEIGRGQ

SEQ ID NO: 46978 - protein, 15 aa, Artificial Sequence
  Peptide Derived from Human Papillomavirus
RVLILHYHLLPLYGP

SEQ ID NO: 46979 - protein, 15 aa, Artificial Sequence
  Peptide Derived from Human Papillomavirus
SCVYSPSPSGSIVTS

SEQ ID NO: 46980 - protein, 15 aa, Artificial Sequence
  Peptide Derived from Human Papillomavirus
SEDVRDNVSVDYKQT

SEQ ID NO: 46981 - protein, 15 aa, Artificial Sequence
  Peptide Derived from Human Papillomavirus
SGSIVTSDSQLFNKP

SEQ ID NO: 46982 - protein, 15 aa, Artificial Sequence
  Peptide Derived from Human Papillomavirus
SIFYHAGSSRLLTVG

SEQ ID NO: 46983 - protein, 15 aa, Artificial Sequence
  Peptide Derived from Human Papillomavirus
SILVYMVHIIICGHY

SEQ ID NO: 46984 - protein, 15 aa, Artificial Sequence
  Peptide Derived from Human Papillomavirus
SLDLDQYPLGRKFLV

SEQ ID NO: 46985 - protein, 15 aa, Artificial Sequence
  Peptide Derived from Human Papillomavirus
SLYIKGTGMPASPGS

SEQ ID NO: 46986 - protein, 15 aa, Artificial Sequence
  Peptide Derived from Human Papillomavirus
SRHVEEYDLQFIFQL

SEQ ID NO: 46987 - protein, 15 aa, Artificial Sequence
  Peptide Derived from Human Papillomavirus
SRLLTVGNPYFRVPA

SEQ ID NO: 46988 - protein, 15 aa, Artificial Sequence
  Peptide Derived from Human Papillomavirus
SRPLSQGDCPPLELK

SEQ ID NO: 46989 - protein, 15 aa, Artificial Sequence
  Peptide Derived from Human Papillomavirus
STNLTICASTQSPVP

SEQ ID NO: 46990 - protein, 15 aa, Artificial Sequence
  Peptide Derived from Human Papillomavirus
SVDYKQTQLCILGCA

SEQ ID NO: 46991 - protein, 15 aa, Artificial Sequence
  Peptide Derived from Human Papillomavirus
TDDYVTPTSIFYHAG

SEQ ID NO: 46992 - protein, 15 aa, Artificial Sequence
  Peptide Derived from Human Papillomavirus
TITLTADVMSYIHSM

SEQ ID NO: 46993 - protein, 15 aa, Artificial Sequence
  Peptide Derived from Human Papillomavirus
TQRLVWACAGVEIGR

SEQ ID NO: 46994 - protein, 15 aa, Artificial Sequence
  Peptide Derived from Human Papillomavirus
TSIFYHAGSSRLLTV

SEQ ID NO: 46995 - protein, 15 aa, Artificial Sequence
  Peptide Derived from Human Papillomavirus
TVYLPPPSVARVVNT

SEQ ID NO: 46996 - protein, 15 aa, Artificial Sequence
  Peptide Derived from Human Papillomavirus
TYRFVQSVAITCQKD

SEQ ID NO: 46997 - protein, 15 aa, Artificial Sequence
  Peptide Derived from Human Papillomavirus
VDTYRFVQSVAITCQ

SEQ ID NO: 46998 - protein, 15 aa, Artificial Sequence
  Peptide Derived from Human Papillomavirus
VEEYDLQFIFQLCTI

SEQ ID NO: 46999 - protein, 15 aa, Artificial Sequence
  Peptide Derived from Human Papillomavirus
VFPIFLQMALWRPSD

SEQ ID NO: 47000 - protein, 15 aa, Artificial Sequence
  Peptide Derived from Human Papillomavirus
VFRVQLPDPNKFGLP

SEQ ID NO: 47001 - protein, 15 aa, Artificial Sequence
  Peptide Derived from Human Papillomavirus
VLILHYHLLPLYGPL

SEQ ID NO: 47002 - protein, 15 aa, Artificial Sequence
  Peptide Derived from Human Papillomavirus
VTVVDTTPSTNLTIC

SEQ ID NO: 47003 - protein, 15 aa, Artificial Sequence
  Peptide Derived from Human Papillomavirus
VYMVHIIICGHYIIL

SEQ ID NO: 47004 - protein, 15 aa, Artificial Sequence
  Peptide Derived from Human Papillomavirus
YDKLKFWNVDLKEKF

SEQ ID NO: 47005 - protein, 15 aa, Artificial Sequence
  Peptide Derived from Human Papillomavirus
YGAMDFSTLQDTKCE

SEQ ID NO: 47006 - protein, 15 aa, Artificial Sequence
  Peptide Derived from Human Papillomavirus
YGPLYHPRPLPLHSI

SEQ ID NO: 47007 - protein, 15 aa, Artificial Sequence
  Peptide Derived from Human Papillomavirus
YHLLPLYGPLYHPRP

SEQ ID NO: 47008 - protein, 15 aa, Artificial Sequence
  Peptide Derived from Human Papillomavirus
YIILFLRNVNVFPIF

SEQ ID NO: 47009 - protein, 15 aa, Artificial Sequence
  Peptide Derived from Human Papillomavirus
YNKLDDTESSHAATS

SEQ ID NO: 47010 - protein, 15 aa, Artificial Sequence
  Peptide Derived from Human Papillomavirus
YPDYLQMSADPYGDS

SEQ ID NO: 47011 - protein, 15 aa, Artificial Sequence
  Peptide Derived from Human Papillomavirus
YRFVQSVAITCQKDA

SEQ ID NO: 47012 - protein, 15 aa, Artificial Sequence
  Peptide Derived from Human Papillomavirus
YRVFRVQLPDPNKFG

SEQ ID NO: 47013 - protein, 15 aa, Artificial Sequence
  Peptide Derived from Human Papillomavirus
  VARIANT (1)..(3): Xaa= Any amino acid
XXXMVSHRAARRKRA

SEQ ID NO: 47014 - protein, 15 aa, Artificial Sequence
  Peptide Derived from Human Papillomavirus
  VARIANT (1)..(2): Xaa= Any amino acid
XXMVSHRAARRKRAS

SEQ ID NO: 47015 - protein, 15 aa, Artificial Sequence
  Peptide Derived from Human Papillomavirus
ADDMDPAVPVPSRST

SEQ ID NO: 47016 - protein, 15 aa, Artificial Sequence
  Peptide Derived from Human Papillomavirus
ADKILQWSSLGIFLG

SEQ ID NO: 47017 - protein, 15 aa, Artificial Sequence
  Peptide Derived from Human Papillomavirus
AGNVFVGTPTSGTHG

SEQ ID NO: 47018 - protein, 15 aa, Artificial Sequence
  Peptide Derived from Human Papillomavirus
ASSYSNVTVPLTSSW

SEQ ID NO: 47019 - protein, 15 aa, Artificial Sequence
  Peptide Derived from Human Papillomavirus
ATMFTRSGTQIGARV

SEQ ID NO: 47020 - protein, 15 aa, Artificial Sequence
  Peptide Derived from Human Papillomavirus
AVPVPSRSTTSFAFF

SEQ ID NO: 47021 - protein, 15 aa, Artificial Sequence
  Peptide Derived from Human Papillomavirus
DITLPSTTSVWPIVS

SEQ ID NO: 47022 - protein, 15 aa, Artificial Sequence
  Peptide Derived from Human Papillomavirus
DKILQWSSLGIFLGG

SEQ ID NO: 47023 - protein, 15 aa, Artificial Sequence
  Peptide Derived from Human Papillomavirus
DNDLFDIYADDMDPA

SEQ ID NO: 47024 - protein, 15 aa, Artificial Sequence
  Peptide Derived from Human Papillomavirus
DSSVVTSGAPRPTFT

SEQ ID NO: 47025 - protein, 15 aa, Artificial Sequence
  Peptide Derived from Human Papillomavirus
EEPISSTPLPTVRRV

SEQ ID NO: 47026 - protein, 15 aa, Artificial Sequence
  Peptide Derived from Human Papillomavirus
EIPLQTFASSGTGEE

SEQ ID NO: 47027 - protein, 15 aa, Artificial Sequence
  Peptide Derived from Human Papillomavirus
FAFFKYSPTISSASS

SEQ ID NO: 47028 - protein, 15 aa, Artificial Sequence
  Peptide Derived from Human Papillomavirus
FEPVDTTLTFDPRSD

SEQ ID NO: 47029 - protein, 15 aa, Artificial Sequence
  Peptide Derived from Human Papillomavirus
FFKYSPTISSASSYS

SEQ ID NO: 47030 - protein, 15 aa, Artificial Sequence
  Peptide Derived from Human Papillomavirus
FSRLGQRATMFTRSG

SEQ ID NO: 47031 - protein, 15 aa, Artificial Sequence
  Peptide Derived from Human Papillomavirus
GFDITSAGTTTPAVL

SEQ ID NO: 47032 - protein, 15 aa, Artificial Sequence
  Peptide Derived from Human Papillomavirus
GIFLGGLGIGTGSGT

SEQ ID NO: 47033 - protein, 15 aa, Artificial Sequence
  Peptide Derived from Human Papillomavirus
GNVFVGTPTSGTHGY

SEQ ID NO: 47034 - protein, 15 aa, Artificial Sequence
  Peptide Derived from Human Papillomavirus
GPDITLPSTTSVWPI

SEQ ID NO: 47035 - protein, 15 aa, Artificial Sequence
  Peptide Derived from Human Papillomavirus
GTHYYLWPLYYFIPK

SEQ ID NO: 47036 - protein, 15 aa, Artificial Sequence
  Peptide Derived from Human Papillomavirus
GTTLADKILQWSSLG

SEQ ID NO: 47037 - protein, 15 aa, Artificial Sequence
  Peptide Derived from Human Papillomavirus
IEPVGPTDPSIVTLI

SEQ ID NO: 47038 - protein, 15 aa, Artificial Sequence
  Peptide Derived from Human Papillomavirus
IIRLHRPALTSRRGT

SEQ ID NO: 47039 - protein, 15 aa, Artificial Sequence
  Peptide Derived from Human Papillomavirus
ILQWSSLGIFLGGLG

SEQ ID NO: 47040 - protein, 15 aa, Artificial Sequence
  Peptide Derived from Human Papillomavirus
IVTLIEDSSVVTSGA

SEQ ID NO: 47041 - protein, 15 aa, Artificial Sequence
  Peptide Derived from Human Papillomavirus
LFDIYADDMDPAVPV

SEQ ID NO: 47042 - protein, 15 aa, Artificial Sequence
  Peptide Derived from Human Papillomavirus
LQTFASSGTGEEPIS

SEQ ID NO: 47043 - protein, 15 aa, Artificial Sequence
  Peptide Derived from Human Papillomavirus
LWPLYYFIPKKRKRV

SEQ ID NO: 47044 - protein, 15 aa, Artificial Sequence
  Peptide Derived from Human Papillomavirus
MDIIRLHRPALTSRR

SEQ ID NO: 47045 - protein, 15 aa, Artificial Sequence
  Peptide Derived from Human Papillomavirus
NPAFEPVDTTLTFDP

SEQ ID NO: 47046 - protein, 15 aa, Artificial Sequence
  Peptide Derived from Human Papillomavirus
NPAFSDPSIIEVPQT

SEQ ID NO: 47047 - protein, 15 aa, Artificial Sequence
  Peptide Derived from Human Papillomavirus
NPEFLTRPSSLITYD

SEQ ID NO: 47048 - protein, 15 aa, Artificial Sequence
  Peptide Derived from Human Papillomavirus
NTVVDVGPTRPPVVI

SEQ ID NO: 47049 - protein, 15 aa, Artificial Sequence
  Peptide Derived from Human Papillomavirus
NVFVGTPTSGTHGYE

SEQ ID NO: 47050 - protein, 15 aa, Artificial Sequence
  Peptide Derived from Human Papillomavirus
NVTVPLTSSWDVPVY

SEQ ID NO: 47051 - protein, 15 aa, Artificial Sequence
  Peptide Derived from Human Papillomavirus
PAVLDITPSSTSVSI

SEQ ID NO: 47052 - protein, 15 aa, Artificial Sequence
  Peptide Derived from Human Papillomavirus
PEFLTRPSSLITYDN

SEQ ID NO: 47053 - protein, 15 aa, Artificial Sequence
  Peptide Derived from Human Papillomavirus
PEYIELQPLVSATED

SEQ ID NO: 47054 - protein, 15 aa, Artificial Sequence
  Peptide Derived from Human Papillomavirus
PSIIEVPQTGEVAGN

SEQ ID NO: 47055 - protein, 15 aa, Artificial Sequence
  Peptide Derived from Human Papillomavirus
PVVIEPVGPTDPSIV

SEQ ID NO: 47056 - protein, 15 aa, Artificial Sequence
  Peptide Derived from Human Papillomavirus
RGTVRFSRLGQRATM

SEQ ID NO: 47057 - protein, 15 aa, Artificial Sequence
  Peptide Derived from Human Papillomavirus
RKRVPYFFADGFVAA

SEQ ID NO: 47058 - protein, 15 aa, Artificial Sequence
  Peptide Derived from Human Papillomavirus
RPPVVIEPVGPTDPS

SEQ ID NO: 47059 - protein, 15 aa, Artificial Sequence
  Peptide Derived from Human Papillomavirus
RVHFYHDISPIAPSP

SEQ ID NO: 47060 - protein, 15 aa, Artificial Sequence
  Peptide Derived from Human Papillomavirus
SDFMDIIRLHRPALT

SEQ ID NO: 47061 - protein, 15 aa, Artificial Sequence
  Peptide Derived from Human Papillomavirus
SFAFFKYSPTISSAS

SEQ ID NO: 47062 - protein, 15 aa, Artificial Sequence
  Peptide Derived from Human Papillomavirus
SLGIFLGGLGIGTGS

SEQ ID NO: 47063 - protein, 15 aa, Artificial Sequence
  Peptide Derived from Human Papillomavirus
SNTVVDVGPTRPPVV

SEQ ID NO: 47064 - protein, 15 aa, Artificial Sequence
  Peptide Derived from Human Papillomavirus
SPEYIELQPLVSATE

SEQ ID NO: 47065 - protein, 15 aa, Artificial Sequence
  Peptide Derived from Human Papillomavirus
SPTISSASSYSNVTV

SEQ ID NO: 47066 - protein, 15 aa, Artificial Sequence
  Peptide Derived from Human Papillomavirus
SRAYQQVSVANPEFL

SEQ ID NO: 47067 - protein, 15 aa, Artificial Sequence
  Peptide Derived from Human Papillomavirus
SSLITYDNPAFEPVD

SEQ ID NO: 47068 - protein, 15 aa, Artificial Sequence
  Peptide Derived from Human Papillomavirus
SSVVTSGAPRPTFTG

SEQ ID NO: 47069 - protein, 15 aa, Artificial Sequence
  Peptide Derived from Human Papillomavirus
STSVSISTTNFTNPA

SEQ ID NO: 47070 - protein, 15 aa, Artificial Sequence
  Peptide Derived from Human Papillomavirus
THGYEEIPLQTFASS

SEQ ID NO: 47071 - protein, 15 aa, Artificial Sequence
  Peptide Derived from Human Papillomavirus
TPAVLDITPSSTSVS

SEQ ID NO: 47072 - protein, 15 aa, Artificial Sequence
  Peptide Derived from Human Papillomavirus
TQYIGIHGTHYYLWP

SEQ ID NO: 47073 - protein, 15 aa, Artificial Sequence
  Peptide Derived from Human Papillomavirus
TSGFDITSAGTTTPA

SEQ ID NO: 47074 - protein, 15 aa, Artificial Sequence
  Peptide Derived from Human Papillomavirus
TSVWPIVSPTAPAST

SEQ ID NO: 47075 - protein, 15 aa, Artificial Sequence
  Peptide Derived from Human Papillomavirus
TTSVWPIVSPTAPAS

SEQ ID NO: 47076 - protein, 15 aa, Artificial Sequence
  Peptide Derived from Human Papillomavirus
VHFYHDISPIAPSPE

SEQ ID NO: 47077 - protein, 15 aa, Artificial Sequence
  Peptide Derived from Human Papillomavirus
VLDITPSSTSVSIST

SEQ ID NO: 47078 - protein, 15 aa, Artificial Sequence
  Peptide Derived from Human Papillomavirus
VPKVEGTTLADKILQ

SEQ ID NO: 47079 - protein, 15 aa, Artificial Sequence
  Peptide Derived from Human Papillomavirus
VPVYTGPDITLPSTT

SEQ ID NO: 47080 - protein, 15 aa, Artificial Sequence
  Peptide Derived from Human Papillomavirus
VRRVAGPRLYSRAYQ

SEQ ID NO: 47081 - protein, 15 aa, Artificial Sequence
  Peptide Derived from Human Papillomavirus
VTLIEDSSVVTSGAP

SEQ ID NO: 47082 - protein, 15 aa, Artificial Sequence
  Peptide Derived from Human Papillomavirus
VVDVGPTRPPVVIEP

SEQ ID NO: 47083 - protein, 15 aa, Artificial Sequence
  Peptide Derived from Human Papillomavirus
VWPIVSPTAPASTQY

SEQ ID NO: 47084 - protein, 15 aa, Artificial Sequence
  Peptide Derived from Human Papillomavirus
WPIVSPTAPASTQYI

SEQ ID NO: 47085 - protein, 15 aa, Artificial Sequence
  Peptide Derived from Human Papillomavirus
YHDISPIAPSPEYIE

SEQ ID NO: 47086 - protein, 15 aa, Artificial Sequence
  Peptide Derived from Human Papillomavirus
YIELQPLVSATEDND

SEQ ID NO: 47087 - protein, 15 aa, Artificial Sequence
  Peptide Derived from Human Papillomavirus
YQQVSVANPEFLTRP

SEQ ID NO: 47088 - protein, 15 aa, Artificial Sequence
  Peptide Derived from Human Papillomavirus
YSNVTVPLTSSWDVP

SEQ ID NO: 47089 - protein, 15 aa, Artificial Sequence
  Peptide Derived from Human Papillomavirus
AAALYWYRTGMSNIS

SEQ ID NO: 47090 - protein, 15 aa, Artificial Sequence
  Peptide Derived from Human Papillomavirus
ACAFLKSNSQAKIVK

SEQ ID NO: 47091 - protein, 15 aa, Artificial Sequence
  Peptide Derived from Human Papillomavirus
ACSWGMVMLMLVRFK

SEQ ID NO: 47092 - protein, 15 aa, Artificial Sequence
  Peptide Derived from Human Papillomavirus
AFGVTGTVAEGFKTL

SEQ ID NO: 47093 - protein, 15 aa, Artificial Sequence
  Peptide Derived from Human Papillomavirus
AKIVKDCGTMCRHYK

SEQ ID NO: 47094 - protein, 15 aa, Artificial Sequence
  Peptide Derived from Human Papillomavirus
ALKLFLKGVPKKNCI

SEQ ID NO: 47095 - protein, 15 aa, Artificial Sequence
  Peptide Derived from Human Papillomavirus
ALYWYRTGMSNISDV

SEQ ID NO: 47096 - protein, 15 aa, Artificial Sequence
  Peptide Derived from Human Papillomavirus
CMLIQPPKLRSTAAA

SEQ ID NO: 47097 - protein, 15 aa, Artificial Sequence
  Peptide Derived from Human Papillomavirus
CNGWFYVEAVIDRQT

SEQ ID NO: 47098 - protein, 15 aa, Artificial Sequence
  Peptide Derived from Human Papillomavirus
CWHYIDNYLRNALDG

SEQ ID NO: 47099 - protein, 15 aa, Artificial Sequence
  Peptide Derived from Human Papillomavirus
DDRWPYLHSRLVVFT

SEQ ID NO: 47100 - protein, 15 aa, Artificial Sequence
  Peptide Derived from Human Papillomavirus
DKNWKSFFSRTWCRL

SEQ ID NO: 47101 - protein, 15 aa, Artificial Sequence
  Peptide Derived from Human Papillomavirus
DSEIAYKYAQLADSD

SEQ ID NO: 47102 - protein, 15 aa, Artificial Sequence
  Peptide Derived from Human Papillomavirus
DSGYGNTEVETQQMV

SEQ ID NO: 47103 - protein, 15 aa, Artificial Sequence
  Peptide Derived from Human Papillomavirus
DTTFDLSQMVQWAYD

SEQ ID NO: 47104 - protein, 15 aa, Artificial Sequence
  Peptide Derived from Human Papillomavirus
DWCVAAFGVTGTVAE

SEQ ID NO: 47105 - protein, 15 aa, Artificial Sequence
  Peptide Derived from Human Papillomavirus
EIAYKYAQLADSDSN

SEQ ID NO: 47106 - protein, 15 aa, Artificial Sequence
  Peptide Derived from Human Papillomavirus
EKLLEKLLCISTNCM

SEQ ID NO: 47107 - protein, 12 aa, Artificial Sequence
  Peptide Derived from Human Papillomavirus
FKCVSGQNIRTL

SEQ ID NO: 47108 - protein, 15 aa, Artificial Sequence
  Peptide Derived from Human Papillomavirus
FKTLLQPYCLYCHLQ

SEQ ID NO: 47109 - protein, 15 aa, Artificial Sequence
  Peptide Derived from Human Papillomavirus
GCIISYANSKSHFWL

SEQ ID NO: 47110 - protein, 15 aa, Artificial Sequence
  Peptide Derived from Human Papillomavirus
GDSFSTFKCVSGQNI

SEQ ID NO: 47111 - protein, 15 aa, Artificial Sequence
  Peptide Derived from Human Papillomavirus
GKSYFGMSLISFLQG

SEQ ID NO: 47112 - protein, 15 aa, Artificial Sequence
  Peptide Derived from Human Papillomavirus
GSPLSDISSCVDYNI

SEQ ID NO: 47113 - protein, 15 aa, Artificial Sequence
  Peptide Derived from Human Papillomavirus
GWFYVEAVIDRQTGD

SEQ ID NO: 47114 - protein, 15 aa, Artificial Sequence
  Peptide Derived from Human Papillomavirus
HKALMQLKCPPLLIT

SEQ ID NO: 47115 - protein, 15 aa, Artificial Sequence
  Peptide Derived from Human Papillomavirus
IDNYLRNALDGNPVS

SEQ ID NO: 47116 - protein, 15 aa, Artificial Sequence
  Peptide Derived from Human Papillomavirus
IEFVSFLSALKLFLK

SEQ ID NO: 47117 - protein, 15 aa, Artificial Sequence
  Peptide Derived from Human Papillomavirus
IEKLLEKLLCISTNC

SEQ ID NO: 47118 - protein, 15 aa, Artificial Sequence
  Peptide Derived from Human Papillomavirus
IGMLDDATTPCWHYI

SEQ ID NO: 47119 - protein, 15 aa, Artificial Sequence
  Peptide Derived from Human Papillomavirus
IISYANSKSHFWLQP

SEQ ID NO: 47120 - protein, 15 aa, Artificial Sequence
  Peptide Derived from Human Papillomavirus
IRPFQSNKSTCTDWC

SEQ ID NO: 47121 - protein, 15 aa, Artificial Sequence
  Peptide Derived from Human Papillomavirus
ISDVYGETPEWIERQ

SEQ ID NO: 47122 - protein, 15 aa, Artificial Sequence
  Peptide Derived from Human Papillomavirus
ISFLQGCIISYANSK

SEQ ID NO: 47123 - protein, 15 aa, Artificial Sequence
  Peptide Derived from Human Papillomavirus
KALMQLKCPPLLITS

SEQ ID NO: 47124 - protein, 15 aa, Artificial Sequence
  Peptide Derived from Human Papillomavirus
KELYGVSFMELIRPF

SEQ ID NO: 47125 - protein, 15 aa, Artificial Sequence
  Peptide Derived from Human Papillomavirus
KIGMLDDATTPCWHY

SEQ ID NO: 47126 - protein, 15 aa, Artificial Sequence
  Peptide Derived from Human Papillomavirus
KNCILIHGAPNTGKS

SEQ ID NO: 47127 - protein, 15 aa, Artificial Sequence
  Peptide Derived from Human Papillomavirus
KNRITIEKLLEKLLC

SEQ ID NO: 47128 - protein, 15 aa, Artificial Sequence
  Peptide Derived from Human Papillomavirus
KRKYVGSPLSDISSC

SEQ ID NO: 47129 - protein, 15 aa, Artificial Sequence
  Peptide Derived from Human Papillomavirus
KSFFSRTWCRLNLHE

SEQ ID NO: 47130 - protein, 15 aa, Artificial Sequence
  Peptide Derived from Human Papillomavirus
KSHFWLQPLADAKIG

SEQ ID NO: 47131 - protein, 15 aa, Artificial Sequence
  Peptide Derived from Human Papillomavirus
KSYFGMSLISFLQGC

SEQ ID NO: 47132 - protein, 15 aa, Artificial Sequence
  Peptide Derived from Human Papillomavirus
KTLLQPYCLYCHLQS

SEQ ID NO: 47133 - protein, 15 aa, Artificial Sequence
  Peptide Derived from Human Papillomavirus
LEKLLCISTNCMLIQ

SEQ ID NO: 47134 - protein, 15 aa, Artificial Sequence
  Peptide Derived from Human Papillomavirus
LISFLQGCIISYANS

SEQ ID NO: 47135 - protein, 15 aa, Artificial Sequence
  Peptide Derived from Human Papillomavirus
LKGVPKKNCILIHGA

SEQ ID NO: 47136 - protein, 15 aa, Artificial Sequence
  Peptide Derived from Human Papillomavirus
LKLFLKGVPKKNCIL

SEQ ID NO: 47137 - protein, 15 aa, Artificial Sequence
  Peptide Derived from Human Papillomavirus
LLCISTNCMLIQPPK

SEQ ID NO: 47138 - protein, 15 aa, Artificial Sequence
  Peptide Derived from Human Papillomavirus
LMLVRFKCAKNRITI

SEQ ID NO: 47139 - protein, 15 aa, Artificial Sequence
  Peptide Derived from Human Papillomavirus
LMQLKCPPLLITSNI

SEQ ID NO: 47140 - protein, 15 aa, Artificial Sequence
  Peptide Derived from Human Papillomavirus
LQPLADAKIGMLDDA

SEQ ID NO: 47141 - protein, 15 aa, Artificial Sequence
  Peptide Derived from Human Papillomavirus
LVVFTFPNPFPFDKN

SEQ ID NO: 47142 - protein, 15 aa, Artificial Sequence
  Peptide Derived from Human Papillomavirus
LYGVSFMELIRPFQS

SEQ ID NO: 47143 - protein, 15 aa, Artificial Sequence
  Peptide Derived from Human Papillomavirus
LYWYRTGMSNISDVY

SEQ ID NO: 47144 - protein, 15 aa, Artificial Sequence
  Peptide Derived from Human Papillomavirus
MELIRPFQSNKSTCT

SEQ ID NO: 47145 - protein, 15 aa, Artificial Sequence
  Peptide Derived from Human Papillomavirus
MGQWIKSRCDKVSDE

SEQ ID NO: 47146 - protein, 15 aa, Artificial Sequence
  Peptide Derived from Human Papillomavirus
MLMLVRFKCAKNRIT

SEQ ID NO: 47147 - protein, 15 aa, Artificial Sequence
  Peptide Derived from Human Papillomavirus
MVQVEEQQTTLSCNG

SEQ ID NO: 47148 - protein, 15 aa, Artificial Sequence
  Peptide Derived from Human Papillomavirus
NCILIHGAPNTGKSY

SEQ ID NO: 47149 - protein, 15 aa, Artificial Sequence
  Peptide Derived from Human Papillomavirus
NCNVYNNQAEAETAQ

SEQ ID NO: 47150 - protein, 15 aa, Artificial Sequence
  Peptide Derived from Human Papillomavirus
NDVMDDSEIAYKYAQ

SEQ ID NO: 47151 - protein, 15 aa, Artificial Sequence
  Peptide Derived from Human Papillomavirus
NGWFYVEAVIDRQTG

SEQ ID NO: 47152 - protein, 15 aa, Artificial Sequence
  Peptide Derived from Human Papillomavirus
NTEVETQQMVQVEEQ

SEQ ID NO: 47153 - protein, 15 aa, Artificial Sequence
  Peptide Derived from Human Papillomavirus
PEWIERQTVLQHSFN

SEQ ID NO: 47154 - protein, 15 aa, Artificial Sequence
  Peptide Derived from Human Papillomavirus
PPKLRSTAAALYWYR

SEQ ID NO: 47155 - protein, 15 aa, Artificial Sequence
  Peptide Derived from Human Papillomavirus
PPLLITSNINAGKDD

SEQ ID NO: 47156 - protein, 15 aa, Artificial Sequence
  Peptide Derived from Human Papillomavirus
QALFHAQEAEEHAEA

SEQ ID NO: 47157 - protein, 15 aa, Artificial Sequence
  Peptide Derived from Human Papillomavirus
QIEFVSFLSALKLFL

SEQ ID NO: 47158 - protein, 15 aa, Artificial Sequence
  Peptide Derived from Human Papillomavirus
QTTLSCNGSDGTHSE

SEQ ID NO: 47159 - protein, 15 aa, Artificial Sequence
  Peptide Derived from Human Papillomavirus
QWAYDNDVMDDSEIA

SEQ ID NO: 47160 - protein, 15 aa, Artificial Sequence
  Peptide Derived from Human Papillomavirus
RKYVGSPLSDISSCV

SEQ ID NO: 47161 - protein, 15 aa, Artificial Sequence
  Peptide Derived from Human Papillomavirus
RNALDGNPVSIDVKH

SEQ ID NO: 47162 - protein, 15 aa, Artificial Sequence
  Peptide Derived from Human Papillomavirus
RNILQVLKTSNGKAA

SEQ ID NO: 47163 - protein, 15 aa, Artificial Sequence
  Peptide Derived from Human Papillomavirus
RRLFELPDSGYGNTE

SEQ ID NO: 47164 - protein, 15 aa, Artificial Sequence
  Peptide Derived from Human Papillomavirus
RWPYLHSRLVVFTFP

SEQ ID NO: 47165 - protein, 15 aa, Artificial Sequence
  Peptide Derived from Human Papillomavirus
SHFWLQPLADAKIGM

SEQ ID NO: 47166 - protein, 15 aa, Artificial Sequence
  Peptide Derived from Human Papillomavirus
SIDVKHKALMQLKCP

SEQ ID NO: 47167 - protein, 15 aa, Artificial Sequence
  Peptide Derived from Human Papillomavirus
SPRLKAICIENNSKT

SEQ ID NO: 47168 - protein, 15 aa, Artificial Sequence
  Peptide Derived from Human Papillomavirus
SRLVVFTFPNPFPFD

SEQ ID NO: 47169 - protein, 15 aa, Artificial Sequence
  Peptide Derived from Human Papillomavirus
SRTWCRLNLHEEEDK

SEQ ID NO: 47170 - protein, 15 aa, Artificial Sequence
  Peptide Derived from Human Papillomavirus
SSCVDYNISPRLKAI

SEQ ID NO: 47171 - protein, 15 aa, Artificial Sequence
  Peptide Derived from Human Papillomavirus
SWGMVMLMLVRFKCA

SEQ ID NO: 47172 - protein, 15 aa, Artificial Sequence
  Peptide Derived from Human Papillomavirus
TNCMLIQPPKLRSTA

SEQ ID NO: 47173 - protein, 15 aa, Artificial Sequence
  Peptide Derived from Human Papillomavirus
TPEWIERQTVLQHSF

SEQ ID NO: 47174 - protein, 15 aa, Artificial Sequence
  Peptide Derived from Human Papillomavirus
VAAFGVTGTVAEGFK

SEQ ID NO: 47175 - protein, 15 aa, Artificial Sequence
  Peptide Derived from Human Papillomavirus
VDFIDNCNVYNNQAE

SEQ ID NO: 47176 - protein, 15 aa, Artificial Sequence
  Peptide Derived from Human Papillomavirus
VEAVIDRQTGDNISE

SEQ ID NO: 47177 - protein, 15 aa, Artificial Sequence
  Peptide Derived from Human Papillomavirus
VFTFPNPFPFDKNGN

SEQ ID NO: 47178 - protein, 15 aa, Artificial Sequence
  Peptide Derived from Human Papillomavirus
VKFLRYQQIEFVSFL

SEQ ID NO: 47179 - protein, 15 aa, Artificial Sequence
  Peptide Derived from Human Papillomavirus
VQVLKRKYVGSPLSD

SEQ ID NO: 47180 - protein, 15 aa, Artificial Sequence
  Peptide Derived from Human Papillomavirus
VSFLSALKLFLKGVP

SEQ ID NO: 47181 - protein, 15 aa, Artificial Sequence
  Peptide Derived from Human Papillomavirus
VSFMELIRPFQSNKS

SEQ ID NO: 47182 - protein, 15 aa, Artificial Sequence
  Peptide Derived from Human Papillomavirus
WGMVMLMLVRFKCAK

SEQ ID NO: 47183 - protein, 15 aa, Artificial Sequence
  Peptide Derived from Human Papillomavirus
WPYLHSRLVVFTFPN

SEQ ID NO: 47184 - protein, 15 aa, Artificial Sequence
  Peptide Derived from Human Papillomavirus
YAQLADSDSNACAFL

SEQ ID NO: 47185 - protein, 15 aa, Artificial Sequence
  Peptide Derived from Human Papillomavirus
YCHLQSLACSWGMVM

SEQ ID NO: 47186 - protein, 15 aa, Artificial Sequence
  Peptide Derived from Human Papillomavirus
YCLYCHLQSLACSWG

SEQ ID NO: 47187 - protein, 15 aa, Artificial Sequence
  Peptide Derived from Human Papillomavirus
AGIVTKLPTANNTTT

SEQ ID NO: 47188 - protein, 15 aa, Artificial Sequence
  Peptide Derived from Human Papillomavirus
AKALQAIELQMMLET

SEQ ID NO: 47189 - protein, 15 aa, Artificial Sequence
  Peptide Derived from Human Papillomavirus
ALSVSKAKALQAIEL

SEQ ID NO: 47190 - protein, 15 aa, Artificial Sequence
  Peptide Derived from Human Papillomavirus
AREMGIHSINHQVVP

SEQ ID NO: 47191 - protein, 15 aa, Artificial Sequence
  Peptide Derived from Human Papillomavirus
CGVISAAACTNQTRA

SEQ ID NO: 47192 - protein, 15 aa, Artificial Sequence
  Peptide Derived from Human Papillomavirus
DDFLNTVKIPNTVSV

SEQ ID NO: 47193 - protein, 15 aa, Artificial Sequence
  Peptide Derived from Human Papillomavirus
DWTMQQTSLELYLTA

SEQ ID NO: 47194 - protein, 15 aa, Artificial Sequence
  Peptide Derived from Human Papillomavirus
EGQVNCKGIYYVHEG

SEQ ID NO: 47195 - protein, 15 aa, Artificial Sequence
  Peptide Derived from Human Papillomavirus
EISFAGIVTKLPTAN

SEQ ID NO: 47196 - protein, 15 aa, Artificial Sequence
  Peptide Derived from Human Papillomavirus
ELQMMLETLNNTEYK

SEQ ID NO: 47197 - protein, 15 aa, Artificial Sequence
  Peptide Derived from Human Papillomavirus
ESVFSSDEISFAGIV

SEQ ID NO: 47198 - protein, 15 aa, Artificial Sequence
  Peptide Derived from Human Papillomavirus
FAGIVTKLPTANNTT

SEQ ID NO: 47199 - protein, 15 aa, Artificial Sequence
  Peptide Derived from Human Papillomavirus
GDSVDSVNCGVISAA

SEQ ID NO: 47200 - protein, 15 aa, Artificial Sequence
  Peptide Derived from Human Papillomavirus
GQVIVFPESVFSSDE

SEQ ID NO: 47201 - protein, 15 aa, Artificial Sequence
  Peptide Derived from Human Papillomavirus
HIRLECVLMYKAREM

SEQ ID NO: 47202 - protein, 15 aa, Artificial Sequence
  Peptide Derived from Human Papillomavirus
HITYFVNFTEEAKKY

SEQ ID NO: 47203 - protein, 15 aa, Artificial Sequence
  Peptide Derived from Human Papillomavirus
HQVVPALSVSKAKAL

SEQ ID NO: 47204 - protein, 15 aa, Artificial Sequence
  Peptide Derived from Human Papillomavirus
IDYWKHIRLECVLMY

SEQ ID NO: 47205 - protein, 15 aa, Artificial Sequence
  Peptide Derived from Human Papillomavirus
IHSINHQVVPALSVS

SEQ ID NO: 47206 - protein, 15 aa, Artificial Sequence
  Peptide Derived from Human Papillomavirus
IVTLTYISTSQRDDF

SEQ ID NO: 47207 - protein, 15 aa, Artificial Sequence
  Peptide Derived from Human Papillomavirus
IYYVHEGHITYFVNF

SEQ ID NO: 47208 - protein, 15 aa, Artificial Sequence
  Peptide Derived from Human Papillomavirus
KQLYEQVSSTWHWTC

SEQ ID NO: 47209 - protein, 15 aa, Artificial Sequence
  Peptide Derived from Human Papillomavirus
LECVLMYKAREMGIH

SEQ ID NO: 47210 - protein, 15 aa, Artificial Sequence
  Peptide Derived from Human Papillomavirus
LELYLTAPTGCLKKH

SEQ ID NO: 47211 - protein, 15 aa, Artificial Sequence
  Peptide Derived from Human Papillomavirus
LKCLRYRLSKYKQLY

SEQ ID NO: 47212 - protein, 15 aa, Artificial Sequence
  Peptide Derived from Human Papillomavirus
LNTVKIPNTVSVSTG

SEQ ID NO: 47213 - protein, 15 aa, Artificial Sequence
  Peptide Derived from Human Papillomavirus
LQAIELQMMLETLNN

SEQ ID NO: 47214 - protein, 15 aa, Artificial Sequence
  Peptide Derived from Human Papillomavirus
NAIVTLTYISTSQRD

SEQ ID NO: 47215 - protein, 15 aa, Artificial Sequence
  Peptide Derived from Human Papillomavirus
NCGVISAAACTNQTR

SEQ ID NO: 47216 - protein, 15 aa, Artificial Sequence
  Peptide Derived from Human Papillomavirus
NEDWTMQQTSLELYL

SEQ ID NO: 47217 - protein, 15 aa, Artificial Sequence
  Peptide Derived from Human Papillomavirus
NHQVVPALSVSKAKA

SEQ ID NO: 47218 - protein, 15 aa, Artificial Sequence
  Peptide Derived from Human Papillomavirus
NKLLRGDSVDSVNCG

SEQ ID NO: 47219 - protein, 15 aa, Artificial Sequence
  Peptide Derived from Human Papillomavirus
NWKFIYLCIDGQCTV

SEQ ID NO: 47220 - protein, 15 aa, Artificial Sequence
  Peptide Derived from Human Papillomavirus
PNKLLRGDSVDSVNC

SEQ ID NO: 47221 - protein, 15 aa, Artificial Sequence
  Peptide Derived from Human Papillomavirus
QCTVVEGQVNCKGIY

SEQ ID NO: 47222 - protein, 15 aa, Artificial Sequence
  Peptide Derived from Human Papillomavirus
QTSLELYLTAPTGCL

SEQ ID NO: 47223 - protein, 15 aa, Artificial Sequence
  Peptide Derived from Human Papillomavirus
QVIVFPESVFSSDEI

SEQ ID NO: 47224 - protein, 15 aa, Artificial Sequence
  Peptide Derived from Human Papillomavirus
RLNVCQDKILEHYEN

SEQ ID NO: 47225 - protein, 15 aa, Artificial Sequence
  Peptide Derived from Human Papillomavirus
SDEISFAGIVTKLPT

SEQ ID NO: 47226 - protein, 15 aa, Artificial Sequence
  Peptide Derived from Human Papillomavirus
SEGVRRATTSTKRPR

SEQ ID NO: 47227 - protein, 15 aa, Artificial Sequence
  Peptide Derived from Human Papillomavirus
SLELYLTAPTGCLKK

SEQ ID NO: 47228 - protein, 15 aa, Artificial Sequence
  Peptide Derived from Human Papillomavirus
SSTWHWTCTDGKHKN

SEQ ID NO: 47229 - protein, 15 aa, Artificial Sequence
  Peptide Derived from Human Papillomavirus
TRAVSCPATTPIIHL

SEQ ID NO: 47230 - protein, 15 aa, Artificial Sequence
  Peptide Derived from Human Papillomavirus
TVKIPNTVSVSTGYM

SEQ ID NO: 47231 - protein, 15 aa, Artificial Sequence
  Peptide Derived from Human Papillomavirus
VDSVNCGVISAAACT

SEQ ID NO: 47232 - protein, 15 aa, Artificial Sequence
  Peptide Derived from Human Papillomavirus
VLMYKAREMGIHSIN

SEQ ID NO: 47233 - protein, 15 aa, Artificial Sequence
  Peptide Derived from Human Papillomavirus
VPALSVSKAKALQAI

SEQ ID NO: 47234 - protein, 15 aa, Artificial Sequence
  Peptide Derived from Human Papillomavirus
WKHIRLECVLMYKAR

SEQ ID NO: 47235 - protein, 15 aa, Artificial Sequence
  Peptide Derived from Human Papillomavirus
YKQLYEQVSSTWHWT

SEQ ID NO: 47236 - protein, 15 aa, Artificial Sequence
  Peptide Derived from Human Papillomavirus
YLCIDGQCTVVEGQV

SEQ ID NO: 47237 - protein, 15 aa, Artificial Sequence
  Peptide Derived from Human Papillomavirus
YTNWKFIYLCIDGQC

SEQ ID NO: 47238 - protein, 15 aa, Artificial Sequence
  Peptide Derived from Human Papillomavirus
  VARIANT (1)..(3): Xaa= Any amino acid
XXXMIELNISTVSIV

SEQ ID NO: 47239 - protein, 15 aa, Artificial Sequence
  Peptide Derived from Human Papillomavirus
  VARIANT (1)..(2): Xaa= Any amino acid
XXMIELNISTVSIVL

SEQ ID NO: 47240 - protein, 15 aa, Artificial Sequence
  Peptide Derived from Human Papillomavirus
ATLLLLIVILWVIAT

SEQ ID NO: 47241 - protein, 15 aa, Artificial Sequence
  Peptide Derived from Human Papillomavirus
CFCIYVVFIYIPLFV

SEQ ID NO: 47242 - protein, 15 aa, Artificial Sequence
  Peptide Derived from Human Papillomavirus
CFCVLLFVCLVIRPL

SEQ ID NO: 47243 - protein, 15 aa, Artificial Sequence
  Peptide Derived from Human Papillomavirus
CFLLCFCVLLFVCLV

SEQ ID NO: 47244 - protein, 15 aa, Artificial Sequence
  Peptide Derived from Human Papillomavirus
CIYVVFIYIPLFVIH

SEQ ID NO: 47245 - protein, 15 aa, Artificial Sequence
  Peptide Derived from Human Papillomavirus
CLVIRPLVLSVSVYA

SEQ ID NO: 47246 - protein, 15 aa, Artificial Sequence
  Peptide Derived from Human Papillomavirus
CVLLFVCLVIRPLVL

SEQ ID NO: 47247 - protein, 15 aa, Artificial Sequence
  Peptide Derived from Human Papillomavirus
ELNISTVSIVLCFLL

SEQ ID NO: 47248 - protein, 15 aa, Artificial Sequence
  Peptide Derived from Human Papillomavirus
FCVLLFVCLVIRPLV

SEQ ID NO: 47249 - protein, 15 aa, Artificial Sequence
  Peptide Derived from Human Papillomavirus
FIYIPLFVIHTHASF

SEQ ID NO: 47250 - protein, 15 aa, Artificial Sequence
  Peptide Derived from Human Papillomavirus
FVCLVIRPLVLSVSV

SEQ ID NO: 47251 - protein, 15 aa, Artificial Sequence
  Peptide Derived from Human Papillomavirus
ILWVIATSPLRCFCI

SEQ ID NO: 47252 - protein, 15 aa, Artificial Sequence
  Peptide Derived from Human Papillomavirus
IRPLVLSVSVYATLL

SEQ ID NO: 47253 - protein, 15 aa, Artificial Sequence
  Peptide Derived from Human Papillomavirus
ISTVSIVLCFLLCFC

SEQ ID NO: 47254 - protein, 15 aa, Artificial Sequence
  Peptide Derived from Human Papillomavirus
IVILWVIATSPLRCF

SEQ ID NO: 47255 - protein, 15 aa, Artificial Sequence
  Peptide Derived from Human Papillomavirus
IYVVFIYIPLFVIHT

SEQ ID NO: 47256 - protein, 15 aa, Artificial Sequence
  Peptide Derived from Human Papillomavirus
LCFLLCFCVLLFVCL

SEQ ID NO: 47257 - protein, 14 aa, Artificial Sequence
  Peptide Derived from Human Papillomavirus
LFVIHTHASFLSQQ

SEQ ID NO: 47258 - protein, 15 aa, Artificial Sequence
  Peptide Derived from Human Papillomavirus
LIVILWVIATSPLRC

SEQ ID NO: 47259 - protein, 15 aa, Artificial Sequence
  Peptide Derived from Human Papillomavirus
LLIVILWVIATSPLR

SEQ ID NO: 47260 - protein, 15 aa, Artificial Sequence
  Peptide Derived from Human Papillomavirus
LLLIVILWVIATSPL

SEQ ID NO: 47261 - protein, 15 aa, Artificial Sequence
  Peptide Derived from Human Papillomavirus
LRCFCIYVVFIYIPL

SEQ ID NO: 47262 - protein, 15 aa, Artificial Sequence
  Peptide Derived from Human Papillomavirus
LWVIATSPLRCFCIY

SEQ ID NO: 47263 - protein, 15 aa, Artificial Sequence
  Peptide Derived from Human Papillomavirus
MIELNISTVSIVLCF

SEQ ID NO: 47264 - protein, 15 aa, Artificial Sequence
  Peptide Derived from Human Papillomavirus
PLFVIHTHASFLSQQ

SEQ ID NO: 47265 - protein, 15 aa, Artificial Sequence
  Peptide Derived from Human Papillomavirus
RPLVLSVSVYATLLL

SEQ ID NO: 47266 - protein, 15 aa, Artificial Sequence
  Peptide Derived from Human Papillomavirus
SIVLCFLLCFCVLLF

SEQ ID NO: 47267 - protein, 15 aa, Artificial Sequence
  Peptide Derived from Human Papillomavirus
SVSVYATLLLLIVIL

SEQ ID NO: 47268 - protein, 15 aa, Artificial Sequence
  Peptide Derived from Human Papillomavirus
TLLLLIVILWVIATS

SEQ ID NO: 47269 - protein, 15 aa, Artificial Sequence
  Peptide Derived from Human Papillomavirus
TSPLRCFCIYVVFIY

SEQ ID NO: 47270 - protein, 15 aa, Artificial Sequence
  Peptide Derived from Human Papillomavirus
TVSIVLCFLLCFCVL

SEQ ID NO: 47271 - protein, 15 aa, Artificial Sequence
  Peptide Derived from Human Papillomavirus
VCLVIRPLVLSVSVY

SEQ ID NO: 47272 - protein, 15 aa, Artificial Sequence
  Peptide Derived from Human Papillomavirus
VFIYIPLFVIHTHAS

SEQ ID NO: 47273 - protein, 15 aa, Artificial Sequence
  Peptide Derived from Human Papillomavirus
VILWVIATSPLRCFC

SEQ ID NO: 47274 - protein, 15 aa, Artificial Sequence
  Peptide Derived from Human Papillomavirus
VLCFLLCFCVLLFVC

SEQ ID NO: 47275 - protein, 15 aa, Artificial Sequence
  Peptide Derived from Human Papillomavirus
VLLFVCLVIRPLVLS

SEQ ID NO: 47276 - protein, 15 aa, Artificial Sequence
  Peptide Derived from Human Papillomavirus
VLSVSVYATLLLLIV

SEQ ID NO: 47277 - protein, 15 aa, Artificial Sequence
  Peptide Derived from Human Papillomavirus
VSIVLCFLLCFCVLL

SEQ ID NO: 47278 - protein, 15 aa, Artificial Sequence
  Peptide Derived from Human Papillomavirus
VSVYATLLLLIVILW

SEQ ID NO: 47279 - protein, 15 aa, Artificial Sequence
  Peptide Derived from Human Papillomavirus
YATLLLLIVILWVIA

SEQ ID NO: 47280 - protein, 15 aa, Artificial Sequence
  Peptide Derived from Human Papillomavirus
YIPLFVIHTHASFLS

SEQ ID NO: 47281 - protein, 15 aa, Artificial Sequence
  Peptide Derived from Human Papillomavirus
YVVFIYIPLFVIHTH

SEQ ID NO: 47282 - protein, 15 aa, Artificial Sequence
  Peptide Derived from Human Papillomavirus
  VARIANT (1)..(3): Xaa= Any amino acid
XXXMFKNPAERPRKL

SEQ ID NO: 47283 - protein, 15 aa, Artificial Sequence
  Peptide Derived from Human Papillomavirus
ALEIPYDELRLNCVY

SEQ ID NO: 47284 - protein, 15 aa, Artificial Sequence
  Peptide Derived from Human Papillomavirus
CDLLIRCITCQRPLC

SEQ ID NO: 47285 - protein, 15 aa, Artificial Sequence
  Peptide Derived from Human Papillomavirus
CLRFYSKVSEFRWYR

SEQ ID NO: 47286 - protein, 15 aa, Artificial Sequence
  Peptide Derived from Human Papillomavirus
DFAFTDLTIVYRDDT

SEQ ID NO: 47287 - protein, 15 aa, Artificial Sequence
  Peptide Derived from Human Papillomavirus
DLLIRCITCQRPLCP

SEQ ID NO: 47288 - protein, 15 aa, Artificial Sequence
  Peptide Derived from Human Papillomavirus
EFRWYRYSVYGTTLE

SEQ ID NO: 47289 - protein, 15 aa, Artificial Sequence
  Peptide Derived from Human Papillomavirus
EIPYDELRLNCVYCK

SEQ ID NO: 47290 - protein, 15 aa, Artificial Sequence
  Peptide Derived from Human Papillomavirus
ELRLNCVYCKGQLTE

SEQ ID NO: 47291 - protein, 15 aa, Artificial Sequence
  Peptide Derived from Human Papillomavirus
FHNIGGRWTGRCIAC

SEQ ID NO: 47292 - protein, 15 aa, Artificial Sequence
  Peptide Derived from Human Papillomavirus
GGRWTGRCIACWRRP

SEQ ID NO: 47293 - protein, 13 aa, Artificial Sequence
  Peptide Derived from Human Papillomavirus
IACWRRPRTETQV

SEQ ID NO: 47294 - protein, 15 aa, Artificial Sequence
  Peptide Derived from Human Papillomavirus
ICDLLIRCITCQRPL

SEQ ID NO: 47295 - protein, 15 aa, Artificial Sequence
  Peptide Derived from Human Papillomavirus
IRCITCQRPLCPEEK

SEQ ID NO: 47296 - protein, 15 aa, Artificial Sequence
  Peptide Derived from Human Papillomavirus
KGQLTETEVLDFAFT

SEQ ID NO: 47297 - protein, 15 aa, Artificial Sequence
  Peptide Derived from Human Papillomavirus
LEKLTNKGICDLLIR

SEQ ID NO: 47298 - protein, 15 aa, Artificial Sequence
  Peptide Derived from Human Papillomavirus
LTIVYRDDTPHGVCT

SEQ ID NO: 47299 - protein, 15 aa, Artificial Sequence
  Peptide Derived from Human Papillomavirus
NCVYCKGQLTETEVL

SEQ ID NO: 47300 - protein, 15 aa, Artificial Sequence
  Peptide Derived from Human Papillomavirus
NKGICDLLIRCITCQ

SEQ ID NO: 47301 - protein, 15 aa, Artificial Sequence
  Peptide Derived from Human Papillomavirus
PHGVCTKCLRFYSKV

SEQ ID NO: 47302 - protein, 15 aa, Artificial Sequence
  Peptide Derived from Human Papillomavirus
PRKLHELSSALEIPY

SEQ ID NO: 47303 - protein, 15 aa, Artificial Sequence
  Peptide Derived from Human Papillomavirus
RYSVYGTTLEKLTNK

SEQ ID NO: 47304 - protein, 15 aa, Artificial Sequence
  Peptide Derived from Human Papillomavirus
TEVLDFAFTDLTIVY

SEQ ID NO: 47305 - protein, 15 aa, Artificial Sequence
  Peptide Derived from Human Papillomavirus
TIVYRDDTPHGVCTK

SEQ ID NO: 47306 - protein, 15 aa, Artificial Sequence
  Peptide Derived from Human Papillomavirus
VLDFAFTDLTIVYRD

SEQ ID NO: 47307 - protein, 15 aa, Artificial Sequence
  Peptide Derived from Human Papillomavirus
WYRYSVYGTTLEKLT

SEQ ID NO: 47308 - protein, 15 aa, Artificial Sequence
  Peptide Derived from Human Papillomavirus
YDELRLNCVYCKGQL

SEQ ID NO: 47309 - protein, 15 aa, Artificial Sequence
  Peptide Derived from Human Papillomavirus
  VARIANT (1)..(3): Xaa= Any amino acid
XXXMRGETPTLQDYV

SEQ ID NO: 47310 - protein, 15 aa, Artificial Sequence
  Peptide Derived from Human Papillomavirus
DIRILQELLMGSFGI

SEQ ID NO: 47311 - protein, 15 aa, Artificial Sequence
  Peptide Derived from Human Papillomavirus
EEDVIDSPAGQAEPD

SEQ ID NO: 47312 - protein, 15 aa, Artificial Sequence
  Peptide Derived from Human Papillomavirus
ELLMGSFGIVCPNCS

SEQ ID NO: 47313 - protein, 12 aa, Artificial Sequence
  Peptide Derived from Human Papillomavirus
FGIVCPNCSTRL

SEQ ID NO: 47314 - protein, 15 aa, Artificial Sequence
  Peptide Derived from Human Papillomavirus
IRILQELLMGSFGIV

SEQ ID NO: 47315 - protein, 15 aa, Artificial Sequence
  Peptide Derived from Human Papillomavirus
MGSFGIVCPNCSTRL

SEQ ID NO: 47316 - protein, 15 aa, Artificial Sequence
  Peptide Derived from Human Papillomavirus
NYNIVTFCCQCKSTL

SEQ ID NO: 47317 - protein, 15 aa, Artificial Sequence
  Peptide Derived from Human Papillomavirus
QDYVLDLQPEATDLH

SEQ ID NO: 47318 - protein, 15 aa, Artificial Sequence
  Peptide Derived from Human Papillomavirus
RLCVQSTQVDIRILQ

SEQ ID NO: 47319 - protein, 13 aa, Artificial Sequence
  Peptide Derived from Human Papillomavirus
SFGIVCPNCSTRL

SEQ ID NO: 47320 - protein, 15 aa, Artificial Sequence
  Peptide Derived from Human Papillomavirus
STQVDIRILQELLMG

SEQ ID NO: 47321 - protein, 15 aa, Artificial Sequence
  Peptide Derived from Human Papillomavirus
TLRLCVQSTQVDIRI

SEQ ID NO: 47322 - protein, 15 aa, Artificial Sequence
  Peptide Derived from Human Papillomavirus
TPTLQDYVLDLQPEA

SEQ ID NO: 47323 - protein, 15 aa, Artificial Sequence
  Peptide Derived from Human Papillomavirus
VLDLQPEATDLHCYE

SEQ ID NO: 47324 - protein, 15 aa, Artificial Sequence
  Peptide Derived from Human Papillomavirus
  VARIANT (1)..(3): Xaa= Any amino acid
XXXMSLWRPSEATVY

SEQ ID NO: 47325 - protein, 15 aa, Artificial Sequence
  Peptide Derived from Human Papillomavirus
ADIMTYIHSMNPAIL

SEQ ID NO: 47326 - protein, 15 aa, Artificial Sequence
  Peptide Derived from Human Papillomavirus
ARLLTVGHPYYSIPK

SEQ ID NO: 47327 - protein, 15 aa, Artificial Sequence
  Peptide Derived from Human Papillomavirus
ATVYLPPVPVSKVVS

SEQ ID NO: 47328 - protein, 15 aa, Artificial Sequence
  Peptide Derived from Human Papillomavirus
CAAIANSDTTFKSSN

SEQ ID NO: 47329 - protein, 15 aa, Artificial Sequence
  Peptide Derived from Human Papillomavirus
CISMDYKQTQLCLLG

SEQ ID NO: 47330 - protein, 15 aa, Artificial Sequence
  Peptide Derived from Human Papillomavirus
CPPLELKNSVIQDGD

SEQ ID NO: 47331 - protein, 15 aa, Artificial Sequence
  Peptide Derived from Human Papillomavirus
DEYVTRTNIYYHAGS

SEQ ID NO: 47332 - protein, 15 aa, Artificial Sequence
  Peptide Derived from Human Papillomavirus
DLQFIFQLCKITLSA

SEQ ID NO: 47333 - protein, 15 aa, Artificial Sequence
  Peptide Derived from Human Papillomavirus
DLYIKGSGSTATLAN

SEQ ID NO: 47334 - protein, 15 aa, Artificial Sequence
  Peptide Derived from Human Papillomavirus
DTSFYNPETQRLVWA

SEQ ID NO: 47335 - protein, 15 aa, Artificial Sequence
  Peptide Derived from Human Papillomavirus
DWNFGLTTPPSGSLE

SEQ ID NO: 47336 - protein, 15 aa, Artificial Sequence
  Peptide Derived from Human Papillomavirus
DYVFWEVNLKEKFSA

SEQ ID NO: 47337 - protein, 15 aa, Artificial Sequence
  Peptide Derived from Human Papillomavirus
EATVYLPPVPVSKVV

SEQ ID NO: 47338 - protein, 15 aa, Artificial Sequence
  Peptide Derived from Human Papillomavirus
EDTYRFVTSQAITCQ

SEQ ID NO: 47339 - protein, 15 aa, Artificial Sequence
  Peptide Derived from Human Papillomavirus
EVNLKEKFSADLDQF

SEQ ID NO: 47340 - protein, 15 aa, Artificial Sequence
  Peptide Derived from Human Papillomavirus
FFYLRREQMFVRHFF

SEQ ID NO: 47341 - protein, 15 aa, Artificial Sequence
  Peptide Derived from Human Papillomavirus
FGAMDFTALQDTKSN

SEQ ID NO: 47342 - protein, 15 aa, Artificial Sequence
  Peptide Derived from Human Papillomavirus
FKDYVFWEVNLKEKF

SEQ ID NO: 47343 - protein, 15 aa, Artificial Sequence
  Peptide Derived from Human Papillomavirus
FTALQDTKSNVPLDI

SEQ ID NO: 47344 - protein, 15 aa, Artificial Sequence
  Peptide Derived from Human Papillomavirus
GEEFDLQFIFQLCKI

SEQ ID NO: 47345 - protein, 15 aa, Artificial Sequence
  Peptide Derived from Human Papillomavirus
GEHWGKGSPCSNNAI

SEQ ID NO: 47346 - protein, 15 aa, Artificial Sequence
  Peptide Derived from Human Papillomavirus
GLEVGRGQPLGVGIS

SEQ ID NO: 47347 - protein, 15 aa, Artificial Sequence
  Peptide Derived from Human Papillomavirus
GLQYRVFRVRLPDPN

SEQ ID NO: 47348 - protein, 15 aa, Artificial Sequence
  Peptide Derived from Human Papillomavirus
GNQLFVTVVDTTRST

SEQ ID NO: 47349 - protein, 15 aa, Artificial Sequence
  Peptide Derived from Human Papillomavirus
GQPLGVGISGHPLLN

SEQ ID NO: 47350 - protein, 15 aa, Artificial Sequence
  Peptide Derived from Human Papillomavirus
GVGISGHPLLNKFDD

SEQ ID NO: 47351 - protein, 15 aa, Artificial Sequence
  Peptide Derived from Human Papillomavirus
HPYYSIPKSDNPKKI

SEQ ID NO: 47352 - protein, 15 aa, Artificial Sequence
  Peptide Derived from Human Papillomavirus
IFQLCKITLSADIMT

SEQ ID NO: 47353 - protein, 15 aa, Artificial Sequence
  Peptide Derived from Human Papillomavirus
IHSMNPAILEDWNFG

SEQ ID NO: 47354 - protein, 15 aa, Artificial Sequence
  Peptide Derived from Human Papillomavirus
KITLSADIMTYIHSM

SEQ ID NO: 47355 - protein, 15 aa, Artificial Sequence
  Peptide Derived from Human Papillomavirus
KKIVVPKVSGLQYRV

SEQ ID NO: 47356 - protein, 15 aa, Artificial Sequence
  Peptide Derived from Human Papillomavirus
KSNVPLDICNSICKY

SEQ ID NO: 47357 - protein, 15 aa, Artificial Sequence
  Peptide Derived from Human Papillomavirus
LCLLGCKPPIGEHWG

SEQ ID NO: 47358 - protein, 15 aa, Artificial Sequence
  Peptide Derived from Human Papillomavirus
LEDWNFGLTTPPSGS

SEQ ID NO: 47359 - protein, 15 aa, Artificial Sequence
  Peptide Derived from Human Papillomavirus
LPPVPVSKVVSTDEY

SEQ ID NO: 47360 - protein, 15 aa, Artificial Sequence
  Peptide Derived from Human Papillomavirus
MSLWRPSEATVYLPP

SEQ ID NO: 47361 - protein, 15 aa, Artificial Sequence
  Peptide Derived from Human Papillomavirus
MTYIHSMNPAILEDW

SEQ ID NO: 47362 - protein, 15 aa, Artificial Sequence
  Peptide Derived from Human Papillomavirus
NFGLTTPPSGSLEDT

SEQ ID NO: 47363 - protein, 15 aa, Artificial Sequence
  Peptide Derived from Human Papillomavirus
NIYYHAGSARLLTVG

SEQ ID NO: 47364 - protein, 15 aa, Artificial Sequence
  Peptide Derived from Human Papillomavirus
NKPYWMQRAQGHNNG

SEQ ID NO: 47365 - protein, 15 aa, Artificial Sequence
  Peptide Derived from Human Papillomavirus
NMSVCAAIANSDTTF

SEQ ID NO: 47366 - protein, 15 aa, Artificial Sequence
  Peptide Derived from Human Papillomavirus
NNAITPGDCPPLELK

SEQ ID NO: 47367 - protein, 15 aa, Artificial Sequence
  Peptide Derived from Human Papillomavirus
NSTYFPTPSGSMVTS

SEQ ID NO: 47368 - protein, 15 aa, Artificial Sequence
  Peptide Derived from Human Papillomavirus
NSVIQDGDMVDTGFG

SEQ ID NO: 47369 - protein, 15 aa, Artificial Sequence
  Peptide Derived from Human Papillomavirus
NVPLDICNSICKYPD

SEQ ID NO: 47370 - protein, 15 aa, Artificial Sequence
  Peptide Derived from Human Papillomavirus
PKKIVVPKVSGLQYR

SEQ ID NO: 47371 - protein, 15 aa, Artificial Sequence
  Peptide Derived from Human Papillomavirus
PLDICNSICKYPDYL

SEQ ID NO: 47372 - protein, 15 aa, Artificial Sequence
  Peptide Derived from Human Papillomavirus
PLELKNSVIQDGDMV

SEQ ID NO: 47373 - protein, 15 aa, Artificial Sequence
  Peptide Derived from Human Papillomavirus
PNKFGFPDTSFYNPE

SEQ ID NO: 47374 - protein, 15 aa, Artificial Sequence
  Peptide Derived from Human Papillomavirus
PTDLYIKGSGSTATL

SEQ ID NO: 47375 - protein, 15 aa, Artificial Sequence
  Peptide Derived from Human Papillomavirus
PVPVSKVVSTDEYVT

SEQ ID NO: 47376 - protein, 15 aa, Artificial Sequence
  Peptide Derived from Human Papillomavirus
QFIFQLCKITLSADI

SEQ ID NO: 47377 - protein, 15 aa, Artificial Sequence
  Peptide Derived from Human Papillomavirus
QFPLGRKFLLQAGYR

SEQ ID NO: 47378 - protein, 15 aa, Artificial Sequence
  Peptide Derived from Human Papillomavirus
QLCLLGCKPPIGEHW

SEQ ID NO: 47379 - protein, 15 aa, Artificial Sequence
  Peptide Derived from Human Papillomavirus
QLFVTVVDTTRSTNM

SEQ ID NO: 47380 - protein, 15 aa, Artificial Sequence
  Peptide Derived from Human Papillomavirus
QTQLCLLGCKPPIGE

SEQ ID NO: 47381 - protein, 15 aa, Artificial Sequence
  Peptide Derived from Human Papillomavirus
QYRVFRVRLPDPNKF

SEQ ID NO: 47382 - protein, 15 aa, Artificial Sequence
  Peptide Derived from Human Papillomavirus
RHFFNRSGTVGESVP

SEQ ID NO: 47383 - protein, 15 aa, Artificial Sequence
  Peptide Derived from Human Papillomavirus
RLVWACVGLEVGRGQ

SEQ ID NO: 47384 - protein, 15 aa, Artificial Sequence
  Peptide Derived from Human Papillomavirus
SADLDQFPLGRKFLL

SEQ ID NO: 47385 - protein, 15 aa, Artificial Sequence
  Peptide Derived from Human Papillomavirus
SGSMVTSDAQIFNKP

SEQ ID NO: 47386 - protein, 15 aa, Artificial Sequence
  Peptide Derived from Human Papillomavirus
SGTVGESVPTDLYIK

SEQ ID NO: 47387 - protein, 15 aa, Artificial Sequence
  Peptide Derived from Human Papillomavirus
SMDYKQTQLCLLGCK

SEQ ID NO: 47388 - protein, 15 aa, Artificial Sequence
  Peptide Derived from Human Papillomavirus
SQAITCQKTAPQKPK

SEQ ID NO: 47389 - protein, 15 aa, Artificial Sequence
  Peptide Derived from Human Papillomavirus
STNMSVCAAIANSDT

SEQ ID NO: 47390 - protein, 15 aa, Artificial Sequence
  Peptide Derived from Human Papillomavirus
TNIYYHAGSARLLTV

SEQ ID NO: 47391 - protein, 15 aa, Artificial Sequence
  Peptide Derived from Human Papillomavirus
TQRLVWACVGLEVGR

SEQ ID NO: 47392 - protein, 15 aa, Artificial Sequence
  Peptide Derived from Human Papillomavirus
TVYLPPVPVSKVVST

SEQ ID NO: 47393 - protein, 15 aa, Artificial Sequence
  Peptide Derived from Human Papillomavirus
TYRFVTSQAITCQKT

SEQ ID NO: 47394 - protein, 15 aa, Artificial Sequence
  Peptide Derived from Human Papillomavirus
VFRVRLPDPNKFGFP

SEQ ID NO: 47395 - protein, 15 aa, Artificial Sequence
  Peptide Derived from Human Papillomavirus
VTVVDTTRSTNMSVC

SEQ ID NO: 47396 - protein, 15 aa, Artificial Sequence
  Peptide Derived from Human Papillomavirus
YPDYLKMVAEPYGDT

SEQ ID NO: 47397 - protein, 15 aa, Artificial Sequence
  Peptide Derived from Human Papillomavirus
YRFVTSQAITCQKTA

SEQ ID NO: 47398 - protein, 15 aa, Artificial Sequence
  Peptide Derived from Human Papillomavirus
YRVFRVRLPDPNKFG

SEQ ID NO: 47399 - protein, 15 aa, Artificial Sequence
  Peptide Derived from Human Papillomavirus
  VARIANT (1)..(3): Xaa= Any amino acid
XXXMRSKRSTKRTKR

SEQ ID NO: 47400 - protein, 15 aa, Artificial Sequence
  Peptide Derived from Human Papillomavirus
ADQILRYGSMGVFFG

SEQ ID NO: 47401 - protein, 15 aa, Artificial Sequence
  Peptide Derived from Human Papillomavirus
DFTVDTPATHNVSPS

SEQ ID NO: 47402 - protein, 15 aa, Artificial Sequence
  Peptide Derived from Human Papillomavirus
DPDFLDIIALHRPAL

SEQ ID NO: 47403 - protein, 15 aa, Artificial Sequence
  Peptide Derived from Human Papillomavirus
DPSVLQPPTPAETSG

SEQ ID NO: 47404 - protein, 15 aa, Artificial Sequence
  Peptide Derived from Human Papillomavirus
DQILRYGSMGVFFGG

SEQ ID NO: 47405 - protein, 15 aa, Artificial Sequence
  Peptide Derived from Human Papillomavirus
DTDFTVDTPATHNVS

SEQ ID NO: 47406 - protein, 15 aa, Artificial Sequence
  Peptide Derived from Human Papillomavirus
DVPIEHAPTQVFPFP

SEQ ID NO: 47407 - protein, 15 aa, Artificial Sequence
  Peptide Derived from Human Papillomavirus
EASIPIRPPVSIDPV

SEQ ID NO: 47408 - protein, 15 aa, Artificial Sequence
  Peptide Derived from Human Papillomavirus
EESLYFSNTSHNIAP

SEQ ID NO: 47409 - protein, 15 aa, Artificial Sequence
  Peptide Derived from Human Papillomavirus
EIPMDTFIVSTNNEN

SEQ ID NO: 47410 - protein, 15 aa, Artificial Sequence
  Peptide Derived from Human Papillomavirus
ESGIVDVGAPAPIPH

SEQ ID NO: 47411 - protein, 15 aa, Artificial Sequence
  Peptide Derived from Human Papillomavirus
ESLYFSNTSHNIAPD

SEQ ID NO: 47412 - protein, 15 aa, Artificial Sequence
  Peptide Derived from Human Papillomavirus
GESIEMQPLGASATT

SEQ ID NO: 47413 - protein, 15 aa, Artificial Sequence
  Peptide Derived from Human Papillomavirus
GGDFYLHPSYYMLKR

SEQ ID NO: 47414 - protein, 15 aa, Artificial Sequence
  Peptide Derived from Human Papillomavirus
GHLLLSSSSISTHNY

SEQ ID NO: 47415 - protein, 15 aa, Artificial Sequence
  Peptide Derived from Human Papillomavirus
GPDVPIEHAPTQVFP

SEQ ID NO: 47416 - protein, 15 aa, Artificial Sequence
  Peptide Derived from Human Papillomavirus
GVFFGGLGIGSGSGT

SEQ ID NO: 47417 - protein, 15 aa, Artificial Sequence
  Peptide Derived from Human Papillomavirus
HLLLSSSSISTHNYE

SEQ ID NO: 47418 - protein, 15 aa, Artificial Sequence
  Peptide Derived from Human Papillomavirus
HTTIADQILRYGSMG

SEQ ID NO: 47419 - protein, 15 aa, Artificial Sequence
  Peptide Derived from Human Papillomavirus
HYYYDISSINPAGES

SEQ ID NO: 47420 - protein, 15 aa, Artificial Sequence
  Peptide Derived from Human Papillomavirus
IDPVGPLDPSIVSLV

SEQ ID NO: 47421 - protein, 15 aa, Artificial Sequence
  Peptide Derived from Human Papillomavirus
IIALHRPALTSRRNT

SEQ ID NO: 47422 - protein, 15 aa, Artificial Sequence
  Peptide Derived from Human Papillomavirus
ILDVTSVSTHENPTF

SEQ ID NO: 47423 - protein, 15 aa, Artificial Sequence
  Peptide Derived from Human Papillomavirus
ILRYGSMGVFFGGLG

SEQ ID NO: 47424 - protein, 15 aa, Artificial Sequence
  Peptide Derived from Human Papillomavirus
IPIFSGPDVPIEHAP

SEQ ID NO: 47425 - protein, 15 aa, Artificial Sequence
  Peptide Derived from Human Papillomavirus
IPKIEHTTIADQILR

SEQ ID NO: 47426 - protein, 15 aa, Artificial Sequence
  Peptide Derived from Human Papillomavirus
IVDVGAPAPIPHPPT

SEQ ID NO: 47427 - protein, 15 aa, Artificial Sequence
  Peptide Derived from Human Papillomavirus
KQLITYENPAYETVN

SEQ ID NO: 47428 - protein, 15 aa, Artificial Sequence
  Peptide Derived from Human Papillomavirus
LDIIALHRPALTSRR

SEQ ID NO: 47429 - protein, 15 aa, Artificial Sequence
  Peptide Derived from Human Papillomavirus
MQPLGASATTTSTLN

SEQ ID NO: 47430 - protein, 15 aa, Artificial Sequence
  Peptide Derived from Human Papillomavirus
NDGLYDIYADTDFTV

SEQ ID NO: 47431 - protein, 15 aa, Artificial Sequence
  Peptide Derived from Human Papillomavirus
NENITSSTPIPGVRR

SEQ ID NO: 47432 - protein, 15 aa, Artificial Sequence
  Peptide Derived from Human Papillomavirus
NPAYETVNAEESLYF

SEQ ID NO: 47433 - protein, 15 aa, Artificial Sequence
  Peptide Derived from Human Papillomavirus
NPTFTDPSVLQPPTP

SEQ ID NO: 47434 - protein, 15 aa, Artificial Sequence
  Peptide Derived from Human Papillomavirus
PAILDVTSVSTHENP

SEQ ID NO: 47435 - protein, 15 aa, Artificial Sequence
  Peptide Derived from Human Papillomavirus
PAPIPHPPTTSGFDI

SEQ ID NO: 47436 - protein, 15 aa, Artificial Sequence
  Peptide Derived from Human Papillomavirus
PDFLDIIALHRPALT

SEQ ID NO: 47437 - protein, 15 aa, Artificial Sequence
  Peptide Derived from Human Papillomavirus
PFPLAPTTPQVSIFV

SEQ ID NO: 47438 - protein, 15 aa, Artificial Sequence
  Peptide Derived from Human Papillomavirus
PSTVSEASIPIRPPV

SEQ ID NO: 47439 - protein, 15 aa, Artificial Sequence
  Peptide Derived from Human Papillomavirus
PSVLQPPTPAETSGH

SEQ ID NO: 47440 - protein, 15 aa, Artificial Sequence
  Peptide Derived from Human Papillomavirus
PTQVFPFPLAPTTPQ

SEQ ID NO: 47441 - protein, 15 aa, Artificial Sequence
  Peptide Derived from Human Papillomavirus
PVSIDPVGPLDPSIV

SEQ ID NO: 47442 - protein, 15 aa, Artificial Sequence
  Peptide Derived from Human Papillomavirus
RKRVSYFFTDVSVAA

SEQ ID NO: 47443 - protein, 15 aa, Artificial Sequence
  Peptide Derived from Human Papillomavirus
RLGLYSKATQQVKVI

SEQ ID NO: 47444 - protein, 15 aa, Artificial Sequence
  Peptide Derived from Human Papillomavirus
RNTVRYSRLGNKQTL

SEQ ID NO: 47445 - protein, 15 aa, Artificial Sequence
  Peptide Derived from Human Papillomavirus
RPPVSIDPVGPLDPS

SEQ ID NO: 47446 - protein, 15 aa, Artificial Sequence
  Peptide Derived from Human Papillomavirus
RTGYVPLSTRPSTVS

SEQ ID NO: 47447 - protein, 15 aa, Artificial Sequence
  Peptide Derived from Human Papillomavirus
RVHYYYDISSINPAG

SEQ ID NO: 47448 - protein, 13 aa, Artificial Sequence
  Peptide Derived from Human Papillomavirus
RVSYFFTDVSVAA

SEQ ID NO: 47449 - protein, 15 aa, Artificial Sequence
  Peptide Derived from Human Papillomavirus
SAYVPTNTTVPLSTG

SEQ ID NO: 47450 - protein, 15 aa, Artificial Sequence
  Peptide Derived from Human Papillomavirus
SGHLLLSSSSISTHN

SEQ ID NO: 47451 - protein, 15 aa, Artificial Sequence
  Peptide Derived from Human Papillomavirus
SGIVDVGAPAPIPHP

SEQ ID NO: 47452 - protein, 15 aa, Artificial Sequence
  Peptide Derived from Human Papillomavirus
SIEMQPLGASATTTS

SEQ ID NO: 47453 - protein, 15 aa, Artificial Sequence
  Peptide Derived from Human Papillomavirus
SIPIRPPVSIDPVGP

SEQ ID NO: 47454 - protein, 15 aa, Artificial Sequence
  Peptide Derived from Human Papillomavirus
SMGVFFGGLGIGSGS

SEQ ID NO: 47455 - protein, 15 aa, Artificial Sequence
  Peptide Derived from Human Papillomavirus
STAVQSTSAVSAYVP

SEQ ID NO: 47456 - protein, 15 aa, Artificial Sequence
  Peptide Derived from Human Papillomavirus
THNVSPSTAVQSTSA

SEQ ID NO: 47457 - protein, 15 aa, Artificial Sequence
  Peptide Derived from Human Papillomavirus
THNYEEIPMDTFIVS

SEQ ID NO: 47458 - protein, 15 aa, Artificial Sequence
  Peptide Derived from Human Papillomavirus
TPAILDVTSVSTHEN

SEQ ID NO: 47459 - protein, 15 aa, Artificial Sequence
  Peptide Derived from Human Papillomavirus
TQLYQTCKAAGTCPS

SEQ ID NO: 47460 - protein, 15 aa, Artificial Sequence
  Peptide Derived from Human Papillomavirus
TQQVKVIDPTFLSAP

SEQ ID NO: 47461 - protein, 15 aa, Artificial Sequence
  Peptide Derived from Human Papillomavirus
TQVFPFPLAPTTPQV

SEQ ID NO: 47462 - protein, 15 aa, Artificial Sequence
  Peptide Derived from Human Papillomavirus
TSAVSAYVPTNTTVP

SEQ ID NO: 47463 - protein, 15 aa, Artificial Sequence
  Peptide Derived from Human Papillomavirus
TSGFDIATTADTTPA

SEQ ID NO: 47464 - protein, 15 aa, Artificial Sequence
  Peptide Derived from Human Papillomavirus
VFPFPLAPTTPQVSI

SEQ ID NO: 47465 - protein, 15 aa, Artificial Sequence
  Peptide Derived from Human Papillomavirus
VGPLDPSIVSLVEES

SEQ ID NO: 47466 - protein, 15 aa, Artificial Sequence
  Peptide Derived from Human Papillomavirus
VHYYYDISSINPAGE

SEQ ID NO: 47467 - protein, 15 aa, Artificial Sequence
  Peptide Derived from Human Papillomavirus
VKVIDPTFLSAPKQL

SEQ ID NO: 47468 - protein, 15 aa, Artificial Sequence
  Peptide Derived from Human Papillomavirus
VSAYVPTNTTVPLST

SEQ ID NO: 47469 - protein, 15 aa, Artificial Sequence
  Peptide Derived from Human Papillomavirus
VSLVEESGIVDVGAP

SEQ ID NO: 47470 - protein, 12 aa, Artificial Sequence
  Peptide Derived from Human Papillomavirus
VSYFFTDVSVAA

SEQ ID NO: 47471 - protein, 15 aa, Artificial Sequence
  Peptide Derived from Human Papillomavirus
YETVNAEESLYFSNT

SEQ ID NO: 47472 - protein, 15 aa, Artificial Sequence
  Peptide Derived from Human Papillomavirus
YSRLGNKQTLRTRSG

SEQ ID NO: 47473 - protein, 15 aa, Artificial Sequence
  Peptide Derived from Human Papillomavirus
YVPLSTRPSTVSEAS

SEQ ID NO: 47474 - protein, 15 aa, Artificial Sequence
  Peptide Derived from Human Papillomavirus
YYDISSINPAGESIE

SEQ ID NO: 47475 - protein, 15 aa, Artificial Sequence
  Peptide Derived from Human Papillomavirus
AAAFLKSNSQAKIVK

SEQ ID NO: 47476 - protein, 15 aa, Artificial Sequence
  Peptide Derived from Human Papillomavirus
AEDVVDRAANPCRTS

SEQ ID NO: 47477 - protein, 15 aa, Artificial Sequence
  Peptide Derived from Human Papillomavirus
AKIVKDCGIMCRHYK

SEQ ID NO: 47478 - protein, 15 aa, Artificial Sequence
  Peptide Derived from Human Papillomavirus
AKLMSNLLSIPETCM

SEQ ID NO: 47479 - protein, 15 aa, Artificial Sequence
  Peptide Derived from Human Papillomavirus
ALYWFRTAMSNISDV

SEQ ID NO: 47480 - protein, 15 aa, Artificial Sequence
  Peptide Derived from Human Papillomavirus
AYGISFMELVRPFKS

SEQ ID NO: 47481 - protein, 15 aa, Artificial Sequence
  Peptide Derived from Human Papillomavirus
CALYWFRTAMSNISD

SEQ ID NO: 47482 - protein, 15 aa, Artificial Sequence
  Peptide Derived from Human Papillomavirus
CENVTLQEISNVLHS

SEQ ID NO: 47483 - protein, 15 aa, Artificial Sequence
  Peptide Derived from Human Papillomavirus
CMVIEPPKLRSQTCA

SEQ ID NO: 47484 - protein, 15 aa, Artificial Sequence
  Peptide Derived from Human Papillomavirus
CTGWFEVEAVIERRT

SEQ ID NO: 47485 - protein, 15 aa, Artificial Sequence
  Peptide Derived from Human Papillomavirus
DENWKSFFSRTWCKL

SEQ ID NO: 47486 - protein, 15 aa, Artificial Sequence
  Peptide Derived from Human Papillomavirus
DIAYYYAQLADSNSN

SEQ ID NO: 47487 - protein, 15 aa, Artificial Sequence
  Peptide Derived from Human Papillomavirus
DNIFDLSEMVQWAYD

SEQ ID NO: 47488 - protein, 15 aa, Artificial Sequence
  Peptide Derived from Human Papillomavirus
DRGIIILLLIRFRCS

SEQ ID NO: 47489 - protein, 15 aa, Artificial Sequence
  Peptide Derived from Human Papillomavirus
DSDIAYYYAQLADSN

SEQ ID NO: 47490 - protein, 15 aa, Artificial Sequence
  Peptide Derived from Human Papillomavirus
DSGYGNTEVETQQMV

SEQ ID NO: 47491 - protein, 15 aa, Artificial Sequence
  Peptide Derived from Human Papillomavirus
DSRWPYLHSRLTVFE

SEQ ID NO: 47492 - protein, 15 aa, Artificial Sequence
  Peptide Derived from Human Papillomavirus
DTNLNDLESSGVGDD

SEQ ID NO: 47493 - protein, 15 aa, Artificial Sequence
  Peptide Derived from Human Papillomavirus
DWCITGYGISPSVAE

SEQ ID NO: 47494 - protein, 15 aa, Artificial Sequence
  Peptide Derived from Human Papillomavirus
ECTYRKRKIDELEDS

SEQ ID NO: 47495 - protein, 15 aa, Artificial Sequence
  Peptide Derived from Human Papillomavirus
EDDLNAVCALKRKFA

SEQ ID NO: 47496 - protein, 15 aa, Artificial Sequence
  Peptide Derived from Human Papillomavirus
ETCMVIEPPKLRSQT

SEQ ID NO: 47497 - protein, 15 aa, Artificial Sequence
  Peptide Derived from Human Papillomavirus
FKKFLKGIPKKSCML

SEQ ID NO: 47498 - protein, 15 aa, Artificial Sequence
  Peptide Derived from Human Papillomavirus
GCVISCVNSKSHFWL

SEQ ID NO: 47499 - protein, 15 aa, Artificial Sequence
  Peptide Derived from Human Papillomavirus
GGNISTFKCSAGENT

SEQ ID NO: 47500 - protein, 15 aa, Artificial Sequence
  Peptide Derived from Human Papillomavirus
GKSYFGMSLIQFLKG

SEQ ID NO: 47501 - protein, 15 aa, Artificial Sequence
  Peptide Derived from Human Papillomavirus
GYGISPSVAESLKVL

SEQ ID NO: 47502 - protein, 15 aa, Artificial Sequence
  Peptide Derived from Human Papillomavirus
HRALVQLKCPPLLLT

SEQ ID NO: 47503 - protein, 15 aa, Artificial Sequence
  Peptide Derived from Human Papillomavirus
HSLYTHLQCLTCDRG

SEQ ID NO: 47504 - protein, 15 aa, Artificial Sequence
  Peptide Derived from Human Papillomavirus
IAYYYAQLADSNSNA

SEQ ID NO: 47505 - protein, 15 aa, Artificial Sequence
  Peptide Derived from Human Papillomavirus
IDDYMRNALDGNEIS

SEQ ID NO: 47506 - protein, 15 aa, Artificial Sequence
  Peptide Derived from Human Papillomavirus
IGMIDDVTPISWTYI

SEQ ID NO: 47507 - protein, 15 aa, Artificial Sequence
  Peptide Derived from Human Papillomavirus
IGQWIQSRCEKTNDG

SEQ ID NO: 47508 - protein, 15 aa, Artificial Sequence
  Peptide Derived from Human Papillomavirus
ILLLIRFRCSKNRLT

SEQ ID NO: 47509 - protein, 15 aa, Artificial Sequence
  Peptide Derived from Human Papillomavirus
IQFLKGCVISCVNSK

SEQ ID NO: 47510 - protein, 15 aa, Artificial Sequence
  Peptide Derived from Human Papillomavirus
ISDVQGTTPEWIDRL

SEQ ID NO: 47511 - protein, 15 aa, Artificial Sequence
  Peptide Derived from Human Papillomavirus
ISFMELVRPFKSDKT

SEQ ID NO: 47512 - protein, 15 aa, Artificial Sequence
  Peptide Derived from Human Papillomavirus
ITGYGISPSVAESLK

SEQ ID NO: 47513 - protein, 15 aa, Artificial Sequence
  Peptide Derived from Human Papillomavirus
KEAYGISFMELVRPF

SEQ ID NO: 47514 - protein, 15 aa, Artificial Sequence
  Peptide Derived from Human Papillomavirus
KIGMIDDVTPISWTY

SEQ ID NO: 47515 - protein, 15 aa, Artificial Sequence
  Peptide Derived from Human Papillomavirus
KNRLTVAKLMSNLLS

SEQ ID NO: 47516 - protein, 15 aa, Artificial Sequence
  Peptide Derived from Human Papillomavirus
KSCMLICGPANTGKS

SEQ ID NO: 47517 - protein, 15 aa, Artificial Sequence
  Peptide Derived from Human Papillomavirus
KSFFSRTWCKLDLIE

SEQ ID NO: 47518 - protein, 15 aa, Artificial Sequence
  Peptide Derived from Human Papillomavirus
KSHFWLQPLSDAKIG

SEQ ID NO: 47519 - protein, 15 aa, Artificial Sequence
  Peptide Derived from Human Papillomavirus
KSYFGMSLIQFLKGC

SEQ ID NO: 47520 - protein, 15 aa, Artificial Sequence
  Peptide Derived from Human Papillomavirus
KVLIKQHSLYTHLQC

SEQ ID NO: 47521 - protein, 15 aa, Artificial Sequence
  Peptide Derived from Human Papillomavirus
LIQFLKGCVISCVNS

SEQ ID NO: 47522 - protein, 15 aa, Artificial Sequence
  Peptide Derived from Human Papillomavirus
LKGIPKKSCMLICGP

SEQ ID NO: 47523 - protein, 15 aa, Artificial Sequence
  Peptide Derived from Human Papillomavirus
LKVLIKQHSLYTHLQ

SEQ ID NO: 47524 - protein, 15 aa, Artificial Sequence
  Peptide Derived from Human Papillomavirus
LLEFIDDSMENSIQA

SEQ ID NO: 47525 - protein, 15 aa, Artificial Sequence
  Peptide Derived from Human Papillomavirus
LLLIRFRCSKNRLTV

SEQ ID NO: 47526 - protein, 15 aa, Artificial Sequence
  Peptide Derived from Human Papillomavirus
LLSIPETCMVIEPPK

SEQ ID NO: 47527 - protein, 15 aa, Artificial Sequence
  Peptide Derived from Human Papillomavirus
LNDLESSGVGDDSEV

SEQ ID NO: 47528 - protein, 15 aa, Artificial Sequence
  Peptide Derived from Human Papillomavirus
LQPLSDAKIGMIDDV

SEQ ID NO: 47529 - protein, 15 aa, Artificial Sequence
  Peptide Derived from Human Papillomavirus
LTVFEFKNPFPFDEN

SEQ ID NO: 47530 - protein, 15 aa, Artificial Sequence
  Peptide Derived from Human Papillomavirus
LVQLKCPPLLLTSNT

SEQ ID NO: 47531 - protein, 15 aa, Artificial Sequence
  Peptide Derived from Human Papillomavirus
LYWFRTAMSNISDVQ

SEQ ID NO: 47532 - protein, 15 aa, Artificial Sequence
  Peptide Derived from Human Papillomavirus
MELVRPFKSDKTSCT

SEQ ID NO: 47533 - protein, 15 aa, Artificial Sequence
  Peptide Derived from Human Papillomavirus
NILYKFKEAYGISFM

SEQ ID NO: 47534 - protein, 15 aa, Artificial Sequence
  Peptide Derived from Human Papillomavirus
NTEVETQQMVQQVES

SEQ ID NO: 47535 - protein, 15 aa, Artificial Sequence
  Peptide Derived from Human Papillomavirus
PEWIDRLTVLQHSFN

SEQ ID NO: 47536 - protein, 15 aa, Artificial Sequence
  Peptide Derived from Human Papillomavirus
PPKLRSQTCALYWFR

SEQ ID NO: 47537 - protein, 15 aa, Artificial Sequence
  Peptide Derived from Human Papillomavirus
PPLLLTSNTNAGTDS

SEQ ID NO: 47538 - protein, 15 aa, Artificial Sequence
  Peptide Derived from Human Papillomavirus
QQMVQQVESQNGDTN

SEQ ID NO: 47539 - protein, 15 aa, Artificial Sequence
  Peptide Derived from Human Papillomavirus
QWAYDNELTDDSDIA

SEQ ID NO: 47540 - protein, 15 aa, Artificial Sequence
  Peptide Derived from Human Papillomavirus
RALVQLKCPPLLLTS

SEQ ID NO: 47541 - protein, 15 aa, Artificial Sequence
  Peptide Derived from Human Papillomavirus
RGIIILLLIRFRCSK

SEQ ID NO: 47542 - protein, 15 aa, Artificial Sequence
  Peptide Derived from Human Papillomavirus
RLTVAKLMSNLLSIP

SEQ ID NO: 47543 - protein, 15 aa, Artificial Sequence
  Peptide Derived from Human Papillomavirus
RNALDGNEISIDVKH

SEQ ID NO: 47544 - protein, 15 aa, Artificial Sequence
  Peptide Derived from Human Papillomavirus
RWPYLHSRLTVFEFK

SEQ ID NO: 47545 - protein, 15 aa, Artificial Sequence
  Peptide Derived from Human Papillomavirus
SCMLICGPANTGKSY

SEQ ID NO: 47546 - protein, 15 aa, Artificial Sequence
  Peptide Derived from Human Papillomavirus
SHFWLQPLSDAKIGM

SEQ ID NO: 47547 - protein, 15 aa, Artificial Sequence
  Peptide Derived from Human Papillomavirus
SIDVKHRALVQLKCP

SEQ ID NO: 47548 - protein, 15 aa, Artificial Sequence
  Peptide Derived from Human Papillomavirus
SNLLSIPETCMVIEP

SEQ ID NO: 47549 - protein, 15 aa, Artificial Sequence
  Peptide Derived from Human Papillomavirus
SNVLHSSNTKANILY

SEQ ID NO: 47550 - protein, 15 aa, Artificial Sequence
  Peptide Derived from Human Papillomavirus
SRTWCKLDLIEEEDK

SEQ ID NO: 47551 - protein, 15 aa, Artificial Sequence
  Peptide Derived from Human Papillomavirus
SWTYIDDYMRNALDG

SEQ ID NO: 47552 - protein, 15 aa, Artificial Sequence
  Peptide Derived from Human Papillomavirus
TCALYWFRTAMSNIS

SEQ ID NO: 47553 - protein, 15 aa, Artificial Sequence
  Peptide Derived from Human Papillomavirus
TGWFEVEAVIERRTG

SEQ ID NO: 47554 - protein, 15 aa, Artificial Sequence
  Peptide Derived from Human Papillomavirus
TPEWIDRLTVLQHSF

SEQ ID NO: 47555 - protein, 15 aa, Artificial Sequence
  Peptide Derived from Human Papillomavirus
VAKLMSNLLSIPETC

SEQ ID NO: 47556 - protein, 15 aa, Artificial Sequence
  Peptide Derived from Human Papillomavirus
VCALKRKFAACSQSA

SEQ ID NO: 47557 - protein, 15 aa, Artificial Sequence
  Peptide Derived from Human Papillomavirus
VEAVIERRTGDNISE

SEQ ID NO: 47558 - protein, 15 aa, Artificial Sequence
  Peptide Derived from Human Papillomavirus
VFEFKNPFPFDENGN

SEQ ID NO: 47559 - protein, 15 aa, Artificial Sequence
  Peptide Derived from Human Papillomavirus
VQLLRYQNIEFTAFL

SEQ ID NO: 47560 - protein, 15 aa, Artificial Sequence
  Peptide Derived from Human Papillomavirus
VRPFKSDKTSCTDWC

SEQ ID NO: 47561 - protein, 15 aa, Artificial Sequence
  Peptide Derived from Human Papillomavirus
VTPISWTYIDDYMRN

SEQ ID NO: 47562 - protein, 15 aa, Artificial Sequence
  Peptide Derived from Human Papillomavirus
WPYLHSRLTVFEFKN

SEQ ID NO: 47563 - protein, 15 aa, Artificial Sequence
  Peptide Derived from Human Papillomavirus
YAQLADSNSNAAAFL

SEQ ID NO: 47564 - protein, 15 aa, Artificial Sequence
  Peptide Derived from Human Papillomavirus
YTHLQCLTCDRGIII

SEQ ID NO: 47565 - protein, 15 aa, Artificial Sequence
  Peptide Derived from Human Papillomavirus
  VARIANT (1)..(3): Xaa= Any amino acid
XXXMEEISARLNAVQ

SEQ ID NO: 47566 - protein, 15 aa, Artificial Sequence
  Peptide Derived from Human Papillomavirus
AAKYSKTQMWEVHVG

SEQ ID NO: 47567 - protein, 15 aa, Artificial Sequence
  Peptide Derived from Human Papillomavirus
AFQVIELQMALETLS

SEQ ID NO: 47568 - protein, 15 aa, Artificial Sequence
  Peptide Derived from Human Papillomavirus
AKQMGFSHLCHQVVP

SEQ ID NO: 47569 - protein, 15 aa, Artificial Sequence
  Peptide Derived from Human Papillomavirus
ALLYTAKQMGFSHLC

SEQ ID NO: 47570 - protein, 15 aa, Artificial Sequence
  Peptide Derived from Human Papillomavirus
AQPLTKLFCADPALD

SEQ ID NO: 47571 - protein, 15 aa, Artificial Sequence
  Peptide Derived from Human Papillomavirus
CHQVVPSLLASKTKA

SEQ ID NO: 47572 - protein, 15 aa, Artificial Sequence
  Peptide Derived from Human Papillomavirus
DPALDNRTARTATNC

SEQ ID NO: 47573 - protein, 15 aa, Artificial Sequence
  Peptide Derived from Human Papillomavirus
EIYIIEEDTCTMVTG

SEQ ID NO: 47574 - protein, 15 aa, Artificial Sequence
  Peptide Derived from Human Papillomavirus
EKILDLYEADKTDLP

SEQ ID NO: 47575 - protein, 15 aa, Artificial Sequence
  Peptide Derived from Human Papillomavirus
ELQMALETLSKSQYS

SEQ ID NO: 47576 - protein, 15 aa, Artificial Sequence
  Peptide Derived from Human Papillomavirus
EVHVGGQVIVCPTSI

SEQ ID NO: 47577 - protein, 15 aa, Artificial Sequence
  Peptide Derived from Human Papillomavirus
FKYFKEDAAKYSKTQ

SEQ ID NO: 47578 - protein, 15 aa, Artificial Sequence
  Peptide Derived from Human Papillomavirus
FQVIELQMALETLSK

SEQ ID NO: 47579 - protein, 15 aa, Artificial Sequence
  Peptide Derived from Human Papillomavirus
FSHLCHQVVPSLLAS

SEQ ID NO: 47580 - protein, 15 aa, Artificial Sequence
  Peptide Derived from Human Papillomavirus
GGQVIVCPTSISSNQ

SEQ ID NO: 47581 - protein, 15 aa, Artificial Sequence
  Peptide Derived from Human Papillomavirus
GQVIVCPTSISSNQI

SEQ ID NO: 47582 - protein, 15 aa, Artificial Sequence
  Peptide Derived from Human Papillomavirus
HQVVPSLLASKTKAF

SEQ ID NO: 47583 - protein, 15 aa, Artificial Sequence
  Peptide Derived from Human Papillomavirus
HWKLIRMECALLYTA

SEQ ID NO: 47584 - protein, 15 aa, Artificial Sequence
  Peptide Derived from Human Papillomavirus
IEHWKLIRMECALLY

SEQ ID NO: 47585 - protein, 15 aa, Artificial Sequence
  Peptide Derived from Human Papillomavirus
IGMYYIHNCEKVYFK

SEQ ID NO: 47586 - protein, 15 aa, Artificial Sequence
  Peptide Derived from Human Papillomavirus
IYIIEEDTCTMVTGK

SEQ ID NO: 47587 - protein, 15 aa, Artificial Sequence
  Peptide Derived from Human Papillomavirus
KELYSSMSSTWHWTS

SEQ ID NO: 47588 - protein, 15 aa, Artificial Sequence
  Peptide Derived from Human Papillomavirus
KTQMWEVHVGGQVIV

SEQ ID NO: 47589 - protein, 15 aa, Artificial Sequence
  Peptide Derived from Human Papillomavirus
LDLYEADKTDLPSQI

SEQ ID NO: 47590 - protein, 15 aa, Artificial Sequence
  Peptide Derived from Human Papillomavirus
LEVWLCEPPKCFKKQ

SEQ ID NO: 47591 - protein, 15 aa, Artificial Sequence
  Peptide Derived from Human Papillomavirus
LGTVKIPPTVQISTG

SEQ ID NO: 47592 - protein, 15 aa, Artificial Sequence
  Peptide Derived from Human Papillomavirus
LIRMECALLYTAKQM

SEQ ID NO: 47593 - protein, 15 aa, Artificial Sequence
  Peptide Derived from Human Papillomavirus
LKPYKELYSSMSSTW

SEQ ID NO: 47594 - protein, 15 aa, Artificial Sequence
  Peptide Derived from Human Papillomavirus
LNAVQEKILDLYEAD

SEQ ID NO: 47595 - protein, 15 aa, Artificial Sequence
  Peptide Derived from Human Papillomavirus
LTKLFCADPALDNRT

SEQ ID NO: 47596 - protein, 15 aa, Artificial Sequence
  Peptide Derived from Human Papillomavirus
NGIVTVTFVTEQQQQ

SEQ ID NO: 47597 - protein, 15 aa, Artificial Sequence
  Peptide Derived from Human Papillomavirus
PSQIEHWKLIRMECA

SEQ ID NO: 47598 - protein, 15 aa, Artificial Sequence
  Peptide Derived from Human Papillomavirus
PTSISSNQISTTETA

SEQ ID NO: 47599 - protein, 15 aa, Artificial Sequence
  Peptide Derived from Human Papillomavirus
QMFLGTVKIPPTVQI

SEQ ID NO: 47600 - protein, 15 aa, Artificial Sequence
  Peptide Derived from Human Papillomavirus
QQQMFLGTVKIPPTV

SEQ ID NO: 47601 - protein, 15 aa, Artificial Sequence
  Peptide Derived from Human Papillomavirus
QRTVCSSNVAPIVHL

SEQ ID NO: 47602 - protein, 15 aa, Artificial Sequence
  Peptide Derived from Human Papillomavirus
QTSLEVWLCEPPKCF

SEQ ID NO: 47603 - protein, 15 aa, Artificial Sequence
  Peptide Derived from Human Papillomavirus
QVIVCPTSISSNQIS

SEQ ID NO: 47604 - protein, 15 aa, Artificial Sequence
  Peptide Derived from Human Papillomavirus
QWTLQQTSLEVWLCE

SEQ ID NO: 47605 - protein, 15 aa, Artificial Sequence
  Peptide Derived from Human Papillomavirus
SLEVWLCEPPKCFKK

SEQ ID NO: 47606 - protein, 15 aa, Artificial Sequence
  Peptide Derived from Human Papillomavirus
SNQISTTETADIQTD

SEQ ID NO: 47607 - protein, 15 aa, Artificial Sequence
  Peptide Derived from Human Papillomavirus
TCTMVTGKVDYIGMY

SEQ ID NO: 47608 - protein, 15 aa, Artificial Sequence
  Peptide Derived from Human Papillomavirus
TGKVDYIGMYYIHNC

SEQ ID NO: 47609 - protein, 15 aa, Artificial Sequence
  Peptide Derived from Human Papillomavirus
TKAFQVIELQMALET

SEQ ID NO: 47610 - protein, 15 aa, Artificial Sequence
  Peptide Derived from Human Papillomavirus
TKLFCADPALDNRTA

SEQ ID NO: 47611 - protein, 15 aa, Artificial Sequence
  Peptide Derived from Human Papillomavirus
TSQWTLQQTSLEVWL

SEQ ID NO: 47612 - protein, 15 aa, Artificial Sequence
  Peptide Derived from Human Papillomavirus
VDYIGMYYIHNCEKV

SEQ ID NO: 47613 - protein, 15 aa, Artificial Sequence
  Peptide Derived from Human Papillomavirus
VPSLLASKTKAFQVI

SEQ ID NO: 47614 - protein, 15 aa, Artificial Sequence
  Peptide Derived from Human Papillomavirus
WKLIRMECALLYTAK

SEQ ID NO: 47615 - protein, 15 aa, Artificial Sequence
  Peptide Derived from Human Papillomavirus
YFKYFKEDAAKYSKT

SEQ ID NO: 47616 - protein, 15 aa, Artificial Sequence
  Peptide Derived from Human Papillomavirus
YKELYSSMSSTWHWT

SEQ ID NO: 47617 - protein, 15 aa, Artificial Sequence
  Peptide Derived from Human Papillomavirus
YTNWGEIYIIEEDTC

SEQ ID NO: 47618 - protein, 15 aa, Artificial Sequence
  Peptide Derived from Human Papillomavirus
  VARIANT (1)..(3): Xaa= Any amino acid
XXXMIFVFVLCFILF

SEQ ID NO: 47619 - protein, 15 aa, Artificial Sequence
  Peptide Derived from Human Papillomavirus
  VARIANT (1)..(2): Xaa= Any amino acid
XXMIFVFVLCFILFL

SEQ ID NO: 47620 - protein, 15 aa, Artificial Sequence
  Peptide Derived from Human Papillomavirus
  VARIANT (1)..(1): Xaa= Any amino acid
XMIFVFVLCFILFLC

SEQ ID NO: 47621 - protein, 15 aa, Artificial Sequence
  Peptide Derived from Human Papillomavirus
AWLLVLVLLLWVFVG

SEQ ID NO: 47622 - protein, 15 aa, Artificial Sequence
  Peptide Derived from Human Papillomavirus
CFILFLCLSLLLRPL

SEQ ID NO: 47623 - protein, 13 aa, Artificial Sequence
  Peptide Derived from Human Papillomavirus
CINFHAQHMTQQE

SEQ ID NO: 47624 - protein, 15 aa, Artificial Sequence
  Peptide Derived from Human Papillomavirus
CLSLLLRPLILSIST

SEQ ID NO: 47625 - protein, 15 aa, Artificial Sequence
  Peptide Derived from Human Papillomavirus
CYLLFLYLPMMCINF

SEQ ID NO: 47626 - protein, 15 aa, Artificial Sequence
  Peptide Derived from Human Papillomavirus
FCYLLFLYLPMMCIN

SEQ ID NO: 47627 - protein, 15 aa, Artificial Sequence
  Peptide Derived from Human Papillomavirus
FILFLCLSLLLRPLI

SEQ ID NO: 47628 - protein, 15 aa, Artificial Sequence
  Peptide Derived from Human Papillomavirus
FLYLPMMCINFHAQH

SEQ ID NO: 47629 - protein, 15 aa, Artificial Sequence
  Peptide Derived from Human Papillomavirus
FVFVLCFILFLCLSL

SEQ ID NO: 47630 - protein, 15 aa, Artificial Sequence
  Peptide Derived from Human Papillomavirus
GSPLKIFFCYLLFLY

SEQ ID NO: 47631 - protein, 15 aa, Artificial Sequence
  Peptide Derived from Human Papillomavirus
IFVFVLCFILFLCLS

SEQ ID NO: 47632 - protein, 15 aa, Artificial Sequence
  Peptide Derived from Human Papillomavirus
ILFLCLSLLLRPLIL

SEQ ID NO: 47633 - protein, 15 aa, Artificial Sequence
  Peptide Derived from Human Papillomavirus
ISTYAWLLVLVLLLW

SEQ ID NO: 47634 - protein, 15 aa, Artificial Sequence
  Peptide Derived from Human Papillomavirus
LCFILFLCLSLLLRP

SEQ ID NO: 47635 - protein, 15 aa, Artificial Sequence
  Peptide Derived from Human Papillomavirus
LFLYLPMMCINFHAQ

SEQ ID NO: 47636 - protein, 15 aa, Artificial Sequence
  Peptide Derived from Human Papillomavirus
LKIFFCYLLFLYLPM

SEQ ID NO: 47637 - protein, 15 aa, Artificial Sequence
  Peptide Derived from Human Papillomavirus
LLFLYLPMMCINFHA

SEQ ID NO: 47638 - protein, 15 aa, Artificial Sequence
  Peptide Derived from Human Papillomavirus
LLLWVFVGSPLKIFF

SEQ ID NO: 47639 - protein, 15 aa, Artificial Sequence
  Peptide Derived from Human Papillomavirus
LLWVFVGSPLKIFFC

SEQ ID NO: 47640 - protein, 15 aa, Artificial Sequence
  Peptide Derived from Human Papillomavirus
LRPLILSISTYAWLL

SEQ ID NO: 47641 - protein, 15 aa, Artificial Sequence
  Peptide Derived from Human Papillomavirus
LSLLLRPLILSISTY

SEQ ID NO: 47642 - protein, 15 aa, Artificial Sequence
  Peptide Derived from Human Papillomavirus
LVLLLWVFVGSPLKI

SEQ ID NO: 47643 - protein, 15 aa, Artificial Sequence
  Peptide Derived from Human Papillomavirus
LVLVLLLWVFVGSPL

SEQ ID NO: 47644 - protein, 15 aa, Artificial Sequence
  Peptide Derived from Human Papillomavirus
LWVFVGSPLKIFFCY

SEQ ID NO: 47645 - protein, 15 aa, Artificial Sequence
  Peptide Derived from Human Papillomavirus
PLKIFFCYLLFLYLP

SEQ ID NO: 47646 - protein, 15 aa, Artificial Sequence
  Peptide Derived from Human Papillomavirus
RPLILSISTYAWLLV

SEQ ID NO: 47647 - protein, 15 aa, Artificial Sequence
  Peptide Derived from Human Papillomavirus
SLLLRPLILSISTYA

SEQ ID NO: 47648 - protein, 15 aa, Artificial Sequence
  Peptide Derived from Human Papillomavirus
TYAWLLVLVLLLWVF

SEQ ID NO: 47649 - protein, 15 aa, Artificial Sequence
  Peptide Derived from Human Papillomavirus
VLCFILFLCLSLLLR

SEQ ID NO: 47650 - protein, 15 aa, Artificial Sequence
  Peptide Derived from Human Papillomavirus
WLLVLVLLLWVFVGS

SEQ ID NO: 47651 - protein, 15 aa, Artificial Sequence
  Peptide Derived from Human Papillomavirus
YAWLLVLVLLLWVFV

SEQ ID NO: 47652 - protein, 15 aa, Artificial Sequence
  Peptide Derived from Human Papillomavirus
YLLFLYLPMMCINFH

SEQ ID NO: 47653 - protein, 15 aa, Artificial Sequence
  Peptide Derived from Human Papillomavirus
CLRFLSKISEYRHYN

SEQ ID NO: 47654 - protein, 15 aa, Artificial Sequence
  Peptide Derived from Human Papillomavirus
DFAFADLTVVYREGN

SEQ ID NO: 47655 - protein, 15 aa, Artificial Sequence
  Peptide Derived from Human Papillomavirus
EILIRCIICQRPLCP

SEQ ID NO: 47656 - protein, 15 aa, Artificial Sequence
  Peptide Derived from Human Papillomavirus
ETTIHNIELQCVECK

SEQ ID NO: 47657 - protein, 15 aa, Artificial Sequence
  Peptide Derived from Human Papillomavirus
FHNISGRWAGRCAAC

SEQ ID NO: 47658 - protein, 15 aa, Artificial Sequence
  Peptide Derived from Human Papillomavirus
GNPFGICKLCLRFLS

SEQ ID NO: 47659 - protein, 15 aa, Artificial Sequence
  Peptide Derived from Human Papillomavirus
ICKLCLRFLSKISEY

SEQ ID NO: 47660 - protein, 15 aa, Artificial Sequence
  Peptide Derived from Human Papillomavirus
IHNIELQCVECKKPL

SEQ ID NO: 47661 - protein, 15 aa, Artificial Sequence
  Peptide Derived from Human Papillomavirus
IRCIICQRPLCPQEK

SEQ ID NO: 47662 - protein, 15 aa, Artificial Sequence
  Peptide Derived from Human Papillomavirus
KKPLNEILIRCIICQ

SEQ ID NO: 47663 - protein, 15 aa, Artificial Sequence
  Peptide Derived from Human Papillomavirus
KKPLQRSEVYDFAFA

SEQ ID NO: 47664 - protein, 15 aa, Artificial Sequence
  Peptide Derived from Human Papillomavirus
LNEILIRCIICQRPL

SEQ ID NO: 47665 - protein, 15 aa, Artificial Sequence
  Peptide Derived from Human Papillomavirus
LQCVECKKPLQRSEV

SEQ ID NO: 47666 - protein, 15 aa, Artificial Sequence
  Peptide Derived from Human Papillomavirus
NEILIRCIICQRPLC

SEQ ID NO: 47667 - protein, 15 aa, Artificial Sequence
  Peptide Derived from Human Papillomavirus
NIELQCVECKKPLQR

SEQ ID NO: 47668 - protein, 15 aa, Artificial Sequence
  Peptide Derived from Human Papillomavirus
NYSVYGNTLEQTVKK

SEQ ID NO: 47669 - protein, 15 aa, Artificial Sequence
  Peptide Derived from Human Papillomavirus
PFGICKLCLRFLSKI

SEQ ID NO: 47670 - protein, 15 aa, Artificial Sequence
  Peptide Derived from Human Papillomavirus
RCIICQRPLCPQEKK

SEQ ID NO: 47671 - protein, 15 aa, Artificial Sequence
  Peptide Derived from Human Papillomavirus
SEVYDFAFADLTVVY

SEQ ID NO: 47672 - protein, 15 aa, Artificial Sequence
  Peptide Derived from Human Papillomavirus
SGRWAGRCAACWRSR

SEQ ID NO: 47673 - protein, 15 aa, Artificial Sequence
  Peptide Derived from Human Papillomavirus
TVVYREGNPFGICKL

SEQ ID NO: 47674 - protein, 15 aa, Artificial Sequence
  Peptide Derived from Human Papillomavirus
VYDFAFADLTVVYRE

SEQ ID NO: 47675 - protein, 15 aa, Artificial Sequence
  Peptide Derived from Human Papillomavirus
  VARIANT (1)..(3): Xaa= Any amino acid
XXXMRGHKPTLKEYV

SEQ ID NO: 47676 - protein, 15 aa, Artificial Sequence
  Peptide Derived from Human Papillomavirus
ADYYIVTCCHTCNTT

SEQ ID NO: 47677 - protein, 15 aa, Artificial Sequence
  Peptide Derived from Human Papillomavirus
IQQLLMGTVNIVCPT

SEQ ID NO: 47678 - protein, 15 aa, Artificial Sequence
  Peptide Derived from Human Papillomavirus
KEYVLDLYPEPTDLY

SEQ ID NO: 47679 - protein, 15 aa, Artificial Sequence
  Peptide Derived from Human Papillomavirus
KPTLKEYVLDLYPEP

SEQ ID NO: 47680 - protein, 15 aa, Artificial Sequence
  Peptide Derived from Human Papillomavirus
LRTIQQLLMGTVNIV

SEQ ID NO: 47681 - protein, 14 aa, Artificial Sequence
  Peptide Derived from Human Papillomavirus
MGTVNIVCPTCAQQ

SEQ ID NO: 47682 - protein, 15 aa, Artificial Sequence
  Peptide Derived from Human Papillomavirus
QLLMGTVNIVCPTCA

SEQ ID NO: 47683 - protein, 15 aa, Artificial Sequence
  Peptide Derived from Human Papillomavirus
RLCVNSTASDLRTIQ

SEQ ID NO: 47684 - protein, 15 aa, Artificial Sequence
  Peptide Derived from Human Papillomavirus
TADYYIVTCCHTCNT

SEQ ID NO: 47685 - protein, 15 aa, Artificial Sequence
  Peptide Derived from Human Papillomavirus
TDLYCYEQLSDSSDE

SEQ ID NO: 47686 - protein, 12 aa, Artificial Sequence
  Peptide Derived from Human Papillomavirus
TVNIVCPTCAQQ

SEQ ID NO: 47687 - protein, 15 aa, Artificial Sequence
  Peptide Derived from Human Papillomavirus
TVRLCVNSTASDLRT

SEQ ID NO: 47688 - protein, 15 aa, Artificial Sequence
  Peptide Derived from Human Papillomavirus
VLDLYPEPTDLYCYE

SEQ ID NO: 47689 - protein, 15 aa, Artificial Sequence
  Peptide Derived from Human Papillomavirus
YYIVTCCHTCNTTVR

SEQ ID NO: 47690 - protein, 15 aa, Artificial Sequence
  Peptide Derived from Human Papillomavirus
  VARIANT (1)..(3): Xaa= Any amino acid
XXXMSVWRPSEATVY

SEQ ID NO: 47691 - protein, 15 aa, Artificial Sequence
  Peptide Derived from Human Papillomavirus
AEVMTYIHAMNPDIL

SEQ ID NO: 47692 - protein, 15 aa, Artificial Sequence
  Peptide Derived from Human Papillomavirus
AGTLGEAVPDDLYIK

SEQ ID NO: 47693 - protein, 15 aa, Artificial Sequence
  Peptide Derived from Human Papillomavirus
AKKLLVPKVSGLQYR

SEQ ID NO: 47694 - protein, 15 aa, Artificial Sequence
  Peptide Derived from Human Papillomavirus
ATVYLPPVPVSKVVS

SEQ ID NO: 47695 - protein, 15 aa, Artificial Sequence
  Peptide Derived from Human Papillomavirus
CLSMDYKQTQLCLLG

SEQ ID NO: 47696 - protein, 15 aa, Artificial Sequence
  Peptide Derived from Human Papillomavirus
CMDFKTLQANKSDVP

SEQ ID NO: 47697 - protein, 15 aa, Artificial Sequence
  Peptide Derived from Human Papillomavirus
CPPLELINTIIEDGD

SEQ ID NO: 47698 - protein, 15 aa, Artificial Sequence
  Peptide Derived from Human Papillomavirus
CTQVTSDSTYKNENF

SEQ ID NO: 47699 - protein, 15 aa, Artificial Sequence
  Peptide Derived from Human Papillomavirus
DEYVSRTSIYYYAGS

SEQ ID NO: 47700 - protein, 15 aa, Artificial Sequence
  Peptide Derived from Human Papillomavirus
DLQFVFQLCKVTLTA

SEQ ID NO: 47701 - protein, 15 aa, Artificial Sequence
  Peptide Derived from Human Papillomavirus
DLYIKGSGTTASIQS

SEQ ID NO: 47702 - protein, 15 aa, Artificial Sequence
  Peptide Derived from Human Papillomavirus
DTSFYNPDTQRLVWA

SEQ ID NO: 47703 - protein, 15 aa, Artificial Sequence
  Peptide Derived from Human Papillomavirus
DVPIDICGSTCKYPD

SEQ ID NO: 47704 - protein, 15 aa, Artificial Sequence
  Peptide Derived from Human Papillomavirus
DWQFGLTPPPSASLQ

SEQ ID NO: 47705 - protein, 15 aa, Artificial Sequence
  Peptide Derived from Human Papillomavirus
EATVYLPPVPVSKVV

SEQ ID NO: 47706 - protein, 15 aa, Artificial Sequence
  Peptide Derived from Human Papillomavirus
EVDLKEKFSADLDQF

SEQ ID NO: 47707 - protein, 15 aa, Artificial Sequence
  Peptide Derived from Human Papillomavirus
FFFLRREQMFVRHFF

SEQ ID NO: 47708 - protein, 15 aa, Artificial Sequence
  Peptide Derived from Human Papillomavirus
FGCMDFKTLQANKSD

SEQ ID NO: 47709 - protein, 15 aa, Artificial Sequence
  Peptide Derived from Human Papillomavirus
FKTLQANKSDVPIDI

SEQ ID NO: 47710 - protein, 15 aa, Artificial Sequence
  Peptide Derived from Human Papillomavirus
GEHWGKGVACTNAAP

SEQ ID NO: 47711 - protein, 15 aa, Artificial Sequence
  Peptide Derived from Human Papillomavirus
GKGVACTNAAPANDC

SEQ ID NO: 47712 - protein, 15 aa, Artificial Sequence
  Peptide Derived from Human Papillomavirus
GLEIGRGQPLGVGIS

SEQ ID NO: 47713 - protein, 15 aa, Artificial Sequence
  Peptide Derived from Human Papillomavirus
GLQYRVFRVRLPDPN

SEQ ID NO: 47714 - protein, 15 aa, Artificial Sequence
  Peptide Derived from Human Papillomavirus
GNQVFVTVVDTTRST

SEQ ID NO: 47715 - protein, 15 aa, Artificial Sequence
  Peptide Derived from Human Papillomavirus
GQPLGVGISGHPLLN

SEQ ID NO: 47716 - protein, 15 aa, Artificial Sequence
  Peptide Derived from Human Papillomavirus
GVGISGHPLLNKFDD

SEQ ID NO: 47717 - protein, 15 aa, Artificial Sequence
  Peptide Derived from Human Papillomavirus
HPYFSIKNPTNAKKL

SEQ ID NO: 47718 - protein, 15 aa, Artificial Sequence
  Peptide Derived from Human Papillomavirus
IHAMNPDILEDWQFG

SEQ ID NO: 47719 - protein, 15 aa, Artificial Sequence
  Peptide Derived from Human Papillomavirus
IRHVEEYDLQFVFQL

SEQ ID NO: 47720 - protein, 15 aa, Artificial Sequence
  Peptide Derived from Human Papillomavirus
KKLLVPKVSGLQYRV

SEQ ID NO: 47721 - protein, 15 aa, Artificial Sequence
  Peptide Derived from Human Papillomavirus
KPKLKRAAPTSTRTS

SEQ ID NO: 47722 - protein, 15 aa, Artificial Sequence
  Peptide Derived from Human Papillomavirus
KSDVPIDICGSTCKY

SEQ ID NO: 47723 - protein, 15 aa, Artificial Sequence
  Peptide Derived from Human Papillomavirus
KVTLTAEVMTYIHAM

SEQ ID NO: 47724 - protein, 15 aa, Artificial Sequence
  Peptide Derived from Human Papillomavirus
KYTFWEVDLKEKFSA

SEQ ID NO: 47725 - protein, 15 aa, Artificial Sequence
  Peptide Derived from Human Papillomavirus
LCLLGCKPPTGEHWG

SEQ ID NO: 47726 - protein, 15 aa, Artificial Sequence
  Peptide Derived from Human Papillomavirus
LEDWQFGLTPPPSAS

SEQ ID NO: 47727 - protein, 15 aa, Artificial Sequence
  Peptide Derived from Human Papillomavirus
LGKYTFWEVDLKEKF

SEQ ID NO: 47728 - protein, 15 aa, Artificial Sequence
  Peptide Derived from Human Papillomavirus
LNKFDDTETGNKYPG

SEQ ID NO: 47729 - protein, 15 aa, Artificial Sequence
  Peptide Derived from Human Papillomavirus
LPPVPVSKVVSTDEY

SEQ ID NO: 47730 - protein, 15 aa, Artificial Sequence
  Peptide Derived from Human Papillomavirus
MSVWRPSEATVYLPP

SEQ ID NO: 47731 - protein, 15 aa, Artificial Sequence
  Peptide Derived from Human Papillomavirus
MTYIHAMNPDILEDW

SEQ ID NO: 47732 - protein, 15 aa, Artificial Sequence
  Peptide Derived from Human Papillomavirus
NKPYWLQRAQGHNNG

SEQ ID NO: 47733 - protein, 15 aa, Artificial Sequence
  Peptide Derived from Human Papillomavirus
NMTLCTQVTSDSTYK

SEQ ID NO: 47734 - protein, 15 aa, Artificial Sequence
  Peptide Derived from Human Papillomavirus
NTIIEDGDMVDTGFG

SEQ ID NO: 47735 - protein, 15 aa, Artificial Sequence
  Peptide Derived from Human Papillomavirus
PDDLYIKGSGTTASI

SEQ ID NO: 47736 - protein, 15 aa, Artificial Sequence
  Peptide Derived from Human Papillomavirus
PIDICGSTCKYPDYL

SEQ ID NO: 47737 - protein, 15 aa, Artificial Sequence
  Peptide Derived from Human Papillomavirus
PLELINTIIEDGDMV

SEQ ID NO: 47738 - protein, 15 aa, Artificial Sequence
  Peptide Derived from Human Papillomavirus
PNKFGFPDTSFYNPD

SEQ ID NO: 47739 - protein, 15 aa, Artificial Sequence
  Peptide Derived from Human Papillomavirus
PVPVSKVVSTDEYVS

SEQ ID NO: 47740 - protein, 15 aa, Artificial Sequence
  Peptide Derived from Human Papillomavirus
QDTYRFVTSQAITCQ

SEQ ID NO: 47741 - protein, 15 aa, Artificial Sequence
  Peptide Derived from Human Papillomavirus
QFGLTPPPSASLQDT

SEQ ID NO: 47742 - protein, 15 aa, Artificial Sequence
  Peptide Derived from Human Papillomavirus
QFPLGRKFLLQAGLK

SEQ ID NO: 47743 - protein, 15 aa, Artificial Sequence
  Peptide Derived from Human Papillomavirus
QFVFQLCKVTLTAEV

SEQ ID NO: 47744 - protein, 15 aa, Artificial Sequence
  Peptide Derived from Human Papillomavirus
QLCLLGCKPPTGEHW

SEQ ID NO: 47745 - protein, 15 aa, Artificial Sequence
  Peptide Derived from Human Papillomavirus
QTQLCLLGCKPPTGE

SEQ ID NO: 47746 - protein, 15 aa, Artificial Sequence
  Peptide Derived from Human Papillomavirus
QVFVTVVDTTRSTNM

SEQ ID NO: 47747 - protein, 15 aa, Artificial Sequence
  Peptide Derived from Human Papillomavirus
QYRVFRVRLPDPNKF

SEQ ID NO: 47748 - protein, 15 aa, Artificial Sequence
  Peptide Derived from Human Papillomavirus
RHFFNRAGTLGEAVP

SEQ ID NO: 47749 - protein, 15 aa, Artificial Sequence
  Peptide Derived from Human Papillomavirus
RKFLLQAGLKAKPKL

SEQ ID NO: 47750 - protein, 15 aa, Artificial Sequence
  Peptide Derived from Human Papillomavirus
RLVWACVGLEIGRGQ

SEQ ID NO: 47751 - protein, 15 aa, Artificial Sequence
  Peptide Derived from Human Papillomavirus
SADLDQFPLGRKFLL

SEQ ID NO: 47752 - protein, 15 aa, Artificial Sequence
  Peptide Derived from Human Papillomavirus
SGSMVTSESQLFNKP

SEQ ID NO: 47753 - protein, 15 aa, Artificial Sequence
  Peptide Derived from Human Papillomavirus
SIYYYAGSSRLLAVG

SEQ ID NO: 47754 - protein, 15 aa, Artificial Sequence
  Peptide Derived from Human Papillomavirus
SMDYKQTQLCLLGCK

SEQ ID NO: 47755 - protein, 15 aa, Artificial Sequence
  Peptide Derived from Human Papillomavirus
SQAITCQKTVPPKEK

SEQ ID NO: 47756 - protein, 15 aa, Artificial Sequence
  Peptide Derived from Human Papillomavirus
SRLLAVGHPYFSIKN

SEQ ID NO: 47757 - protein, 15 aa, Artificial Sequence
  Peptide Derived from Human Papillomavirus
SSAFFPTPSGSMVTS

SEQ ID NO: 47758 - protein, 15 aa, Artificial Sequence
  Peptide Derived from Human Papillomavirus
TDEYVSRTSIYYYAG

SEQ ID NO: 47759 - protein, 15 aa, Artificial Sequence
  Peptide Derived from Human Papillomavirus
TQRLVWACVGLEIGR

SEQ ID NO: 47760 - protein, 15 aa, Artificial Sequence
  Peptide Derived from Human Papillomavirus
TSIYYYAGSSRLLAV

SEQ ID NO: 47761 - protein, 15 aa, Artificial Sequence
  Peptide Derived from Human Papillomavirus
TVYLPPVPVSKVVST

SEQ ID NO: 47762 - protein, 15 aa, Artificial Sequence
  Peptide Derived from Human Papillomavirus
TYRFVTSQAITCQKT

SEQ ID NO: 47763 - protein, 15 aa, Artificial Sequence
  Peptide Derived from Human Papillomavirus
VEEYDLQFVFQLCKV

SEQ ID NO: 47764 - protein, 15 aa, Artificial Sequence
  Peptide Derived from Human Papillomavirus
VFQLCKVTLTAEVMT

SEQ ID NO: 47765 - protein, 15 aa, Artificial Sequence
  Peptide Derived from Human Papillomavirus
VFRVRLPDPNKFGFP

SEQ ID NO: 47766 - protein, 15 aa, Artificial Sequence
  Peptide Derived from Human Papillomavirus
VTVVDTTRSTNMTLC

SEQ ID NO: 47767 - protein, 15 aa, Artificial Sequence
  Peptide Derived from Human Papillomavirus
YPDYLKMTSEPYGDS

SEQ ID NO: 47768 - protein, 15 aa, Artificial Sequence
  Peptide Derived from Human Papillomavirus
YRFVTSQAITCQKTV

SEQ ID NO: 47769 - protein, 15 aa, Artificial Sequence
  Peptide Derived from Human Papillomavirus
YRVFRVRLPDPNKFG

SEQ ID NO: 47770 - protein, 15 aa, Artificial Sequence
  Peptide Derived from Human Papillomavirus
  VARIANT (1)..(3): Xaa= Any amino acid
XXXMRHKRSTRRKRA

SEQ ID NO: 47771 - protein, 15 aa, Artificial Sequence
  Peptide Derived from Human Papillomavirus
ADDVDNVHTPMQHSY

SEQ ID NO: 47772 - protein, 15 aa, Artificial Sequence
  Peptide Derived from Human Papillomavirus
ADQILKYGSLGVFFG

SEQ ID NO: 47773 - protein, 15 aa, Artificial Sequence
  Peptide Derived from Human Papillomavirus
AIPLQPIRPPVTVDT

SEQ ID NO: 47774 - protein, 15 aa, Artificial Sequence
  Peptide Derived from Human Papillomavirus
DPDFLDIIALHRPAI

SEQ ID NO: 47775 - protein, 15 aa, Artificial Sequence
  Peptide Derived from Human Papillomavirus
DQILKYGSLGVFFGG

SEQ ID NO: 47776 - protein, 15 aa, Artificial Sequence
  Peptide Derived from Human Papillomavirus
DTFVVSTDSSNVTSS

SEQ ID NO: 47777 - protein, 15 aa, Artificial Sequence
  Peptide Derived from Human Papillomavirus
EDTLQFQHSDISPAP

SEQ ID NO: 47778 - protein, 15 aa, Artificial Sequence
  Peptide Derived from Human Papillomavirus
EPSVLHPPAPAEASG

SEQ ID NO: 47779 - protein, 15 aa, Artificial Sequence
  Peptide Derived from Human Papillomavirus
ESSIQTISTHLNPTF

SEQ ID NO: 47780 - protein, 15 aa, Artificial Sequence
  Peptide Derived from Human Papillomavirus
ETSFIEAGAPAPSIP

SEQ ID NO: 47781 - protein, 15 aa, Artificial Sequence
  Peptide Derived from Human Papillomavirus
FDTIVVDGADFVLHP

SEQ ID NO: 47782 - protein, 15 aa, Artificial Sequence
  Peptide Derived from Human Papillomavirus
FESFDPEDTLQFQHS

SEQ ID NO: 47783 - protein, 15 aa, Artificial Sequence
  Peptide Derived from Human Papillomavirus
FFPFDTIVVDGADFV

SEQ ID NO: 47784 - protein, 15 aa, Artificial Sequence
  Peptide Derived from Human Papillomavirus
FSRVGQKATLKTRSG

SEQ ID NO: 47785 - protein, 15 aa, Artificial Sequence
  Peptide Derived from Human Papillomavirus
FVPISPFFPFDTIVV

SEQ ID NO: 47786 - protein, 15 aa, Artificial Sequence
  Peptide Derived from Human Papillomavirus
GADFVLHPSYFILRR

SEQ ID NO: 47787 - protein, 15 aa, Artificial Sequence
  Peptide Derived from Human Papillomavirus
GHFIFSSPTVSTQSY

SEQ ID NO: 47788 - protein, 15 aa, Artificial Sequence
  Peptide Derived from Human Papillomavirus
GSTIADQILKYGSLG

SEQ ID NO: 47789 - protein, 15 aa, Artificial Sequence
  Peptide Derived from Human Papillomavirus
GVFFGGLGIGTGSGS

SEQ ID NO: 47790 - protein, 15 aa, Artificial Sequence
  Peptide Derived from Human Papillomavirus
HFIFSSPTVSTQSYE

SEQ ID NO: 47791 - protein, 15 aa, Artificial Sequence
  Peptide Derived from Human Papillomavirus
HKLITYDNPAFESFD

SEQ ID NO: 47792 - protein, 15 aa, Artificial Sequence
  Peptide Derived from Human Papillomavirus
HTPMQHSYSTFATTR

SEQ ID NO: 47793 - protein, 15 aa, Artificial Sequence
  Peptide Derived from Human Papillomavirus
IHYYQDLSPIVPLDH

SEQ ID NO: 47794 - protein, 15 aa, Artificial Sequence
  Peptide Derived from Human Papillomavirus
IIALHRPAITSRRHT

SEQ ID NO: 47795 - protein, 15 aa, Artificial Sequence
  Peptide Derived from Human Papillomavirus
ILKYGSLGVFFGGLG

SEQ ID NO: 47796 - protein, 15 aa, Artificial Sequence
  Peptide Derived from Human Papillomavirus
IPKVEGSTIADQILK

SEQ ID NO: 47797 - protein, 15 aa, Artificial Sequence
  Peptide Derived from Human Papillomavirus
ISPFFPFDTIVVDGA

SEQ ID NO: 47798 - protein, 15 aa, Artificial Sequence
  Peptide Derived from Human Papillomavirus
IVPLDHTVPNEQYEL

SEQ ID NO: 47799 - protein, 15 aa, Artificial Sequence
  Peptide Derived from Human Papillomavirus
IVSLIEETSFIEAGA

SEQ ID NO: 47800 - protein, 15 aa, Artificial Sequence
  Peptide Derived from Human Papillomavirus
LDIIALHRPAITSRR

SEQ ID NO: 47801 - protein, 15 aa, Artificial Sequence
  Peptide Derived from Human Papillomavirus
LQPIRPPVTVDTVGP

SEQ ID NO: 47802 - protein, 15 aa, Artificial Sequence
  Peptide Derived from Human Papillomavirus
LQPLHDTSTSSYSIN

SEQ ID NO: 47803 - protein, 15 aa, Artificial Sequence
  Peptide Derived from Human Papillomavirus
LYDVYADDVDNVHTP

SEQ ID NO: 47804 - protein, 15 aa, Artificial Sequence
  Peptide Derived from Human Papillomavirus
NDGLYDVYADDVDNV

SEQ ID NO: 47805 - protein, 15 aa, Artificial Sequence
  Peptide Derived from Human Papillomavirus
NEQYELQPLHDTSTS

SEQ ID NO: 47806 - protein, 15 aa, Artificial Sequence
  Peptide Derived from Human Papillomavirus
NIPMDTFVVSTDSSN

SEQ ID NO: 47807 - protein, 15 aa, Artificial Sequence
  Peptide Derived from Human Papillomavirus
NPAFESFDPEDTLQF

SEQ ID NO: 47808 - protein, 15 aa, Artificial Sequence
  Peptide Derived from Human Papillomavirus
NPTFTEPSVLHPPAP

SEQ ID NO: 47809 - protein, 15 aa, Artificial Sequence
  Peptide Derived from Human Papillomavirus
NTGFDTPVMSGPDIP

SEQ ID NO: 47810 - protein, 15 aa, Artificial Sequence
  Peptide Derived from Human Papillomavirus
PAIINVSSVGESSIQ

SEQ ID NO: 47811 - protein, 15 aa, Artificial Sequence
  Peptide Derived from Human Papillomavirus
PDFLDIIALHRPAIT

SEQ ID NO: 47812 - protein, 15 aa, Artificial Sequence
  Peptide Derived from Human Papillomavirus
PSGFDVTTSADTTPA

SEQ ID NO: 47813 - protein, 15 aa, Artificial Sequence
  Peptide Derived from Human Papillomavirus
PSPLFPTSSPFVPIS

SEQ ID NO: 47814 - protein, 15 aa, Artificial Sequence
  Peptide Derived from Human Papillomavirus
PSVLHPPAPAEASGH

SEQ ID NO: 47815 - protein, 15 aa, Artificial Sequence
  Peptide Derived from Human Papillomavirus
PVTVDTVGPLDSSIV

SEQ ID NO: 47816 - protein, 15 aa, Artificial Sequence
  Peptide Derived from Human Papillomavirus
QHSYSTFATTRTSNV

SEQ ID NO: 47817 - protein, 13 aa, Artificial Sequence
  Peptide Derived from Human Papillomavirus
RFPYFFTDVRVAA

SEQ ID NO: 47818 - protein, 15 aa, Artificial Sequence
  Peptide Derived from Human Papillomavirus
RHTVRFSRVGQKATL

SEQ ID NO: 47819 - protein, 15 aa, Artificial Sequence
  Peptide Derived from Human Papillomavirus
RIHYYQDLSPIVPLD

SEQ ID NO: 47820 - protein, 15 aa, Artificial Sequence
  Peptide Derived from Human Papillomavirus
RKRFPYFFTDVRVAA

SEQ ID NO: 47821 - protein, 15 aa, Artificial Sequence
  Peptide Derived from Human Papillomavirus
RLGLYSRNTQQVKVV

SEQ ID NO: 47822 - protein, 15 aa, Artificial Sequence
  Peptide Derived from Human Papillomavirus
RPPVTVDTVGPLDSS

SEQ ID NO: 47823 - protein, 15 aa, Artificial Sequence
  Peptide Derived from Human Papillomavirus
RTGYVPIGTDPPTAA

SEQ ID NO: 47824 - protein, 15 aa, Artificial Sequence
  Peptide Derived from Human Papillomavirus
SGHFIFSSPTVSTQS

SEQ ID NO: 47825 - protein, 15 aa, Artificial Sequence
  Peptide Derived from Human Papillomavirus
SLGVFFGGLGIGTGS

SEQ ID NO: 47826 - protein, 15 aa, Artificial Sequence
  Peptide Derived from Human Papillomavirus
SPFFPFDTIVVDGAD

SEQ ID NO: 47827 - protein, 15 aa, Artificial Sequence
  Peptide Derived from Human Papillomavirus
SPIVPLDHTVPNEQY

SEQ ID NO: 47828 - protein, 15 aa, Artificial Sequence
  Peptide Derived from Human Papillomavirus
SPLFPTSSPFVPISP

SEQ ID NO: 47829 - protein, 15 aa, Artificial Sequence
  Peptide Derived from Human Papillomavirus
SRPVARLGLYSRNTQ

SEQ ID NO: 47830 - protein, 15 aa, Artificial Sequence
  Peptide Derived from Human Papillomavirus
SSNVTSSTPIPGSRP

SEQ ID NO: 47831 - protein, 15 aa, Artificial Sequence
  Peptide Derived from Human Papillomavirus
SSPFVPISPFFPFDT

SEQ ID NO: 47832 - protein, 15 aa, Artificial Sequence
  Peptide Derived from Human Papillomavirus
STHLNPTFTEPSVLH

SEQ ID NO: 47833 - protein, 15 aa, Artificial Sequence
  Peptide Derived from Human Papillomavirus
STPIPGSRPVARLGL

SEQ ID NO: 47834 - protein, 15 aa, Artificial Sequence
  Peptide Derived from Human Papillomavirus
TAAIPLQPIRPPVTV

SEQ ID NO: 47835 - protein, 15 aa, Artificial Sequence
  Peptide Derived from Human Papillomavirus
TFVVSTDSSNVTSST

SEQ ID NO: 47836 - protein, 15 aa, Artificial Sequence
  Peptide Derived from Human Papillomavirus
TLQFQHSDISPAPDP

SEQ ID NO: 47837 - protein, 15 aa, Artificial Sequence
  Peptide Derived from Human Papillomavirus
TPAIINVSSVGESSI

SEQ ID NO: 47838 - protein, 15 aa, Artificial Sequence
  Peptide Derived from Human Papillomavirus
TPVMSGPDIPSPLFP

SEQ ID NO: 47839 - protein, 15 aa, Artificial Sequence
  Peptide Derived from Human Papillomavirus
TQLYQTCKATGTCPP

SEQ ID NO: 47840 - protein, 15 aa, Artificial Sequence
  Peptide Derived from Human Papillomavirus
TQQVKVVDPAFLTSP

SEQ ID NO: 47841 - protein, 15 aa, Artificial Sequence
  Peptide Derived from Human Papillomavirus
TQSYENIPMDTFVVS

SEQ ID NO: 47842 - protein, 15 aa, Artificial Sequence
  Peptide Derived from Human Papillomavirus
TSFIEAGAPAPSIPT

SEQ ID NO: 47843 - protein, 15 aa, Artificial Sequence
  Peptide Derived from Human Papillomavirus
VDTVGPLDSSIVSLI

SEQ ID NO: 47844 - protein, 15 aa, Artificial Sequence
  Peptide Derived from Human Papillomavirus
VGPLDSSIVSLIEET

SEQ ID NO: 47845 - protein, 15 aa, Artificial Sequence
  Peptide Derived from Human Papillomavirus
VKVVDPAFLTSPHKL

SEQ ID NO: 47846 - protein, 15 aa, Artificial Sequence
  Peptide Derived from Human Papillomavirus
VSSVGESSIQTISTH

SEQ ID NO: 47847 - protein, 15 aa, Artificial Sequence
  Peptide Derived from Human Papillomavirus
YQDLSPIVPLDHTVP

SEQ ID NO: 47848 - protein, 15 aa, Artificial Sequence
  Peptide Derived from Human Papillomavirus
YSTFATTRTSNVSIP

SEQ ID NO: 47849 - protein, 15 aa, Artificial Sequence
  Peptide Derived from Human Papillomavirus
YVPIGTDPPTAAIPL

SEQ ID NO: 47850 - protein, 15 aa, Artificial Sequence
  Peptide Derived from Human Papillomavirus
AAAFLKSNCQAKYLK

SEQ ID NO: 47851 - protein, 15 aa, Artificial Sequence
  Peptide Derived from Human Papillomavirus
AENVDPHCSITELKE

SEQ ID NO: 47852 - protein, 15 aa, Artificial Sequence
  Peptide Derived from Human Papillomavirus
AKYLKDCAVMCRHYK

SEQ ID NO: 47853 - protein, 15 aa, Artificial Sequence
  Peptide Derived from Human Papillomavirus
ALYWYRTGISNISEV

SEQ ID NO: 47854 - protein, 15 aa, Artificial Sequence
  Peptide Derived from Human Papillomavirus
ATLYAHIQCLDCKWG

SEQ ID NO: 47855 - protein, 15 aa, Artificial Sequence
  Peptide Derived from Human Papillomavirus
CMLIEPPKLRSSVAA

SEQ ID NO: 47856 - protein, 15 aa, Artificial Sequence
  Peptide Derived from Human Papillomavirus
CNGWFFVETIVEKKT

SEQ ID NO: 47857 - protein, 15 aa, Artificial Sequence
  Peptide Derived from Human Papillomavirus
CSEVEAAETQVTVNT

SEQ ID NO: 47858 - protein, 15 aa, Artificial Sequence
  Peptide Derived from Human Papillomavirus
CWTYFDNYMRNALDG

SEQ ID NO: 47859 - protein, 15 aa, Artificial Sequence
  Peptide Derived from Human Papillomavirus
DCKWGVLILALLRYK

SEQ ID NO: 47860 - protein, 15 aa, Artificial Sequence
  Peptide Derived from Human Papillomavirus
DMAFQYAQLADCNSN

SEQ ID NO: 47861 - protein, 15 aa, Artificial Sequence
  Peptide Derived from Human Papillomavirus
DNKWPYLESRVTVFT

SEQ ID NO: 47862 - protein, 15 aa, Artificial Sequence
  Peptide Derived from Human Papillomavirus
DSGYGCSEVEAAETQ

SEQ ID NO: 47863 - protein, 15 aa, Artificial Sequence
  Peptide Derived from Human Papillomavirus
DSNFDLSDMVQWAFD

SEQ ID NO: 47864 - protein, 15 aa, Artificial Sequence
  Peptide Derived from Human Papillomavirus
DWVMAIFGVNPTVAE

SEQ ID NO: 47865 - protein, 15 aa, Artificial Sequence
  Peptide Derived from Human Papillomavirus
ERTWSRLDLHEDDED

SEQ ID NO: 47866 - protein, 15 aa, Artificial Sequence
  Peptide Derived from Human Papillomavirus
ESDMAFQYAQLADCN

SEQ ID NO: 47867 - protein, 15 aa, Artificial Sequence
  Peptide Derived from Human Papillomavirus
ETCMLIEPPKLRSSV

SEQ ID NO: 47868 - protein, 15 aa, Artificial Sequence
  Peptide Derived from Human Papillomavirus
FDNYMRNALDGNPIS

SEQ ID NO: 47869 - protein, 15 aa, Artificial Sequence
  Peptide Derived from Human Papillomavirus
FIHFLQGAIISFVNS

SEQ ID NO: 47870 - protein, 12 aa, Artificial Sequence
  Peptide Derived from Human Papillomavirus
FKCVTGQNTRPL

SEQ ID NO: 47871 - protein, 15 aa, Artificial Sequence
  Peptide Derived from Human Papillomavirus
FKTLIKPATLYAHIQ

SEQ ID NO: 47872 - protein, 15 aa, Artificial Sequence
  Peptide Derived from Human Papillomavirus
GAIISFVNSNSHFWL

SEQ ID NO: 47873 - protein, 15 aa, Artificial Sequence
  Peptide Derived from Human Papillomavirus
GGSVHSTQSSGGDSS

SEQ ID NO: 47874 - protein, 15 aa, Artificial Sequence
  Peptide Derived from Human Papillomavirus
GIPFGTFKCVTGQNT

SEQ ID NO: 47875 - protein, 15 aa, Artificial Sequence
  Peptide Derived from Human Papillomavirus
GWFFVETIVEKKTGD

SEQ ID NO: 47876 - protein, 15 aa, Artificial Sequence
  Peptide Derived from Human Papillomavirus
HKPLLQLKCPPILLT

SEQ ID NO: 47877 - protein, 15 aa, Artificial Sequence
  Peptide Derived from Human Papillomavirus
IFGVNPTVAEGFKTL

SEQ ID NO: 47878 - protein, 15 aa, Artificial Sequence
  Peptide Derived from Human Papillomavirus
IHFLQGAIISFVNSN

SEQ ID NO: 47879 - protein, 15 aa, Artificial Sequence
  Peptide Derived from Human Papillomavirus
IISFVNSNSHFWLEP

SEQ ID NO: 47880 - protein, 15 aa, Artificial Sequence
  Peptide Derived from Human Papillomavirus
ILALLRYKCGKNRLT

SEQ ID NO: 47881 - protein, 15 aa, Artificial Sequence
  Peptide Derived from Human Papillomavirus
ILLYGPANTGKSYFG

SEQ ID NO: 47882 - protein, 15 aa, Artificial Sequence
  Peptide Derived from Human Papillomavirus
ISEVSGDTPEWIQRL

SEQ ID NO: 47883 - protein, 15 aa, Artificial Sequence
  Peptide Derived from Human Papillomavirus
IYGLSFTDLVRNFKS

SEQ ID NO: 47884 - protein, 15 aa, Artificial Sequence
  Peptide Derived from Human Papillomavirus
KCFFERTWSRLDLHE

SEQ ID NO: 47885 - protein, 15 aa, Artificial Sequence
  Peptide Derived from Human Papillomavirus
KDIYGLSFTDLVRNF

SEQ ID NO: 47886 - protein, 15 aa, Artificial Sequence
  Peptide Derived from Human Papillomavirus
KNCILLYGPANTGKS

SEQ ID NO: 47887 - protein, 15 aa, Artificial Sequence
  Peptide Derived from Human Papillomavirus
KPLLQLKCPPILLTS

SEQ ID NO: 47888 - protein, 15 aa, Artificial Sequence
  Peptide Derived from Human Papillomavirus
KSYFGMSFIHFLQGA

SEQ ID NO: 47889 - protein, 15 aa, Artificial Sequence
  Peptide Derived from Human Papillomavirus
KTLIKPATLYAHIQC

SEQ ID NO: 47890 - protein, 15 aa, Artificial Sequence
  Peptide Derived from Human Papillomavirus
KVAMLDDATHTCWTY

SEQ ID NO: 47891 - protein, 15 aa, Artificial Sequence
  Peptide Derived from Human Papillomavirus
KWGVLILALLRYKCG

SEQ ID NO: 47892 - protein, 15 aa, Artificial Sequence
  Peptide Derived from Human Papillomavirus
KWPYLESRVTVFTFP

SEQ ID NO: 47893 - protein, 15 aa, Artificial Sequence
  Peptide Derived from Human Papillomavirus
LEPLADTKVAMLDDA

SEQ ID NO: 47894 - protein, 15 aa, Artificial Sequence
  Peptide Derived from Human Papillomavirus
LHLLKRKFAGGSKEN

SEQ ID NO: 47895 - protein, 15 aa, Artificial Sequence
  Peptide Derived from Human Papillomavirus
LKEFLKGTPKKNCIL

SEQ ID NO: 47896 - protein, 15 aa, Artificial Sequence
  Peptide Derived from Human Papillomavirus
LLHVPETCMLIEPPK

SEQ ID NO: 47897 - protein, 15 aa, Artificial Sequence
  Peptide Derived from Human Papillomavirus
LLQLKCPPILLTSNI

SEQ ID NO: 47898 - protein, 15 aa, Artificial Sequence
  Peptide Derived from Human Papillomavirus
LYWYRTGISNISEVS

SEQ ID NO: 47899 - protein, 15 aa, Artificial Sequence
  Peptide Derived from Human Papillomavirus
MAIFGVNPTVAEGFK

SEQ ID NO: 47900 - protein, 15 aa, Artificial Sequence
  Peptide Derived from Human Papillomavirus
MSQWIKYRCSKIDEG

SEQ ID NO: 47901 - protein, 15 aa, Artificial Sequence
  Peptide Derived from Human Papillomavirus
MVDFIDTQLSICEQA

SEQ ID NO: 47902 - protein, 15 aa, Artificial Sequence
  Peptide Derived from Human Papillomavirus
NCILLYGPANTGKSY

SEQ ID NO: 47903 - protein, 15 aa, Artificial Sequence
  Peptide Derived from Human Papillomavirus
NGWFFVETIVEKKTG

SEQ ID NO: 47904 - protein, 15 aa, Artificial Sequence
  Peptide Derived from Human Papillomavirus
NSHFWLEPLADTKVA

SEQ ID NO: 47905 - protein, 15 aa, Artificial Sequence
  Peptide Derived from Human Papillomavirus
NSPLGEQLSVDTDLS

SEQ ID NO: 47906 - protein, 15 aa, Artificial Sequence
  Peptide Derived from Human Papillomavirus
PEWIQRLTIIQHGID

SEQ ID NO: 47907 - protein, 15 aa, Artificial Sequence
  Peptide Derived from Human Papillomavirus
PPILLTSNIDPAKDN

SEQ ID NO: 47908 - protein, 15 aa, Artificial Sequence
  Peptide Derived from Human Papillomavirus
PPKLRSSVAALYWYR

SEQ ID NO: 47909 - protein, 15 aa, Artificial Sequence
  Peptide Derived from Human Papillomavirus
QAKYLKDCAVMCRHY

SEQ ID NO: 47910 - protein, 15 aa, Artificial Sequence
  Peptide Derived from Human Papillomavirus
QALFHAQEVQNDAQV

SEQ ID NO: 47911 - protein, 15 aa, Artificial Sequence
  Peptide Derived from Human Papillomavirus
QLSVDTDLSPRLQEI

SEQ ID NO: 47912 - protein, 15 aa, Artificial Sequence
  Peptide Derived from Human Papillomavirus
QWAFDNDLTDESDMA

SEQ ID NO: 47913 - protein, 15 aa, Artificial Sequence
  Peptide Derived from Human Papillomavirus
RLTIIQHGIDDSNFD

SEQ ID NO: 47914 - protein, 15 aa, Artificial Sequence
  Peptide Derived from Human Papillomavirus
RLTVAKGLSTLLHVP

SEQ ID NO: 47915 - protein, 15 aa, Artificial Sequence
  Peptide Derived from Human Papillomavirus
RNALDGNPISIDRKH

SEQ ID NO: 47916 - protein, 15 aa, Artificial Sequence
  Peptide Derived from Human Papillomavirus
RRLFTISDSGYGCSE

SEQ ID NO: 47917 - protein, 15 aa, Artificial Sequence
  Peptide Derived from Human Papillomavirus
SDMVDFIDTQLSICE

SEQ ID NO: 47918 - protein, 15 aa, Artificial Sequence
  Peptide Derived from Human Papillomavirus
SHFWLEPLADTKVAM

SEQ ID NO: 47919 - protein, 15 aa, Artificial Sequence
  Peptide Derived from Human Papillomavirus
SPRLQEISLNSGHKK

SEQ ID NO: 47920 - protein, 15 aa, Artificial Sequence
  Peptide Derived from Human Papillomavirus
SQWIKYRCSKIDEGG

SEQ ID NO: 47921 - protein, 15 aa, Artificial Sequence
  Peptide Derived from Human Papillomavirus
STLLHVPETCMLIEP

SEQ ID NO: 47922 - protein, 15 aa, Artificial Sequence
  Peptide Derived from Human Papillomavirus
TDLVRNFKSDKTTCT

SEQ ID NO: 47923 - protein, 15 aa, Artificial Sequence
  Peptide Derived from Human Papillomavirus
TPEWIQRLTIIQHGI

SEQ ID NO: 47924 - protein, 15 aa, Artificial Sequence
  Peptide Derived from Human Papillomavirus
VAALYWYRTGISNIS

SEQ ID NO: 47925 - protein, 15 aa, Artificial Sequence
  Peptide Derived from Human Papillomavirus
VDFIDTQLSICEQAE

SEQ ID NO: 47926 - protein, 15 aa, Artificial Sequence
  Peptide Derived from Human Papillomavirus
VEFISFLRALKEFLK

SEQ ID NO: 47927 - protein, 15 aa, Artificial Sequence
  Peptide Derived from Human Papillomavirus
VETIVEKKTGDVISD

SEQ ID NO: 47928 - protein, 15 aa, Artificial Sequence
  Peptide Derived from Human Papillomavirus
VFTFPHAFPFDKNGN

SEQ ID NO: 47929 - protein, 15 aa, Artificial Sequence
  Peptide Derived from Human Papillomavirus
VMAIFGVNPTVAEGF

SEQ ID NO: 47930 - protein, 15 aa, Artificial Sequence
  Peptide Derived from Human Papillomavirus
VQFLRYQGVEFISFL

SEQ ID NO: 47931 - protein, 15 aa, Artificial Sequence
  Peptide Derived from Human Papillomavirus
VRNFKSDKTTCTDWV

SEQ ID NO: 47932 - protein, 15 aa, Artificial Sequence
  Peptide Derived from Human Papillomavirus
VTVFTFPHAFPFDKN

SEQ ID NO: 47933 - protein, 15 aa, Artificial Sequence
  Peptide Derived from Human Papillomavirus
WGVLILALLRYKCGK

SEQ ID NO: 47934 - protein, 15 aa, Artificial Sequence
  Peptide Derived from Human Papillomavirus
WIKYRCSKIDEGGDW

SEQ ID NO: 47935 - protein, 15 aa, Artificial Sequence
  Peptide Derived from Human Papillomavirus
WPYLESRVTVFTFPH

SEQ ID NO: 47936 - protein, 15 aa, Artificial Sequence
  Peptide Derived from Human Papillomavirus
YAHIQCLDCKWGVLI

SEQ ID NO: 47937 - protein, 15 aa, Artificial Sequence
  Peptide Derived from Human Papillomavirus
YAQLADCNSNAAAFL

SEQ ID NO: 47938 - protein, 15 aa, Artificial Sequence
  Peptide Derived from Human Papillomavirus
  VARIANT (1)..(3): Xaa= Any amino acid
XXXMKMQTPKESLSE

SEQ ID NO: 47939 - protein, 15 aa, Artificial Sequence
  Peptide Derived from Human Papillomavirus
AACVSYWGVYYIKDG

SEQ ID NO: 47940 - protein, 15 aa, Artificial Sequence
  Peptide Derived from Human Papillomavirus
ADHYSEISSTWHWTG

SEQ ID NO: 47941 - protein, 15 aa, Artificial Sequence
  Peptide Derived from Human Papillomavirus
CEELWNTEPSQCFKK

SEQ ID NO: 47942 - protein, 15 aa, Artificial Sequence
  Peptide Derived from Human Papillomavirus
CEKYGNSNTWEVQYG

SEQ ID NO: 47943 - protein, 15 aa, Artificial Sequence
  Peptide Derived from Human Papillomavirus
CMNYVVWDSIYYITE

SEQ ID NO: 47944 - protein, 15 aa, Artificial Sequence
  Peptide Derived from Human Papillomavirus
DDTVSATQIVRQLQH

SEQ ID NO: 47945 - protein, 15 aa, Artificial Sequence
  Peptide Derived from Human Papillomavirus
DSIYYITETGIWDKT

SEQ ID NO: 47946 - protein, 15 aa, Artificial Sequence
  Peptide Derived from Human Papillomavirus
EELWNTEPSQCFKKG

SEQ ID NO: 47947 - protein, 15 aa, Artificial Sequence
  Peptide Derived from Human Papillomavirus
ELQMALKGLAQSKYN

SEQ ID NO: 47948 - protein, 15 aa, Artificial Sequence
  Peptide Derived from Human Papillomavirus
ETGIWDKTAACVSYW

SEQ ID NO: 47949 - protein, 15 aa, Artificial Sequence
  Peptide Derived from Human Papillomavirus
EVQYGGNVIDCNDSM

SEQ ID NO: 47950 - protein, 15 aa, Artificial Sequence
  Peptide Derived from Human Papillomavirus
GNVIDCNDSMCSTSD

SEQ ID NO: 47951 - protein, 15 aa, Artificial Sequence
  Peptide Derived from Human Papillomavirus
HKAIELQMALKGLAQ

SEQ ID NO: 47952 - protein, 15 aa, Artificial Sequence
  Peptide Derived from Human Papillomavirus
HNPLLCSSTSNNKRR

SEQ ID NO: 47953 - protein, 15 aa, Artificial Sequence
  Peptide Derived from Human Papillomavirus
HQVVPPINISKSKAH

SEQ ID NO: 47954 - protein, 15 aa, Artificial Sequence
  Peptide Derived from Human Papillomavirus
ISYWQLIRLENAILF

SEQ ID NO: 47955 - protein, 15 aa, Artificial Sequence
  Peptide Derived from Human Papillomavirus
ITKLNHQVVPPINIS

SEQ ID NO: 47956 - protein, 15 aa, Artificial Sequence
  Peptide Derived from Human Papillomavirus
IYYITETGIWDKTAA

SEQ ID NO: 47957 - protein, 15 aa, Artificial Sequence
  Peptide Derived from Human Papillomavirus
KESLSERLSALQDKI

SEQ ID NO: 47958 - protein, 15 aa, Artificial Sequence
  Peptide Derived from Human Papillomavirus
KPHIQTPATKRPRQC

SEQ ID NO: 47959 - protein, 15 aa, Artificial Sequence
  Peptide Derived from Human Papillomavirus
LDVVTIPNSVQISVG

SEQ ID NO: 47960 - protein, 15 aa, Artificial Sequence
  Peptide Derived from Human Papillomavirus
LIRLENAILFTAREH

SEQ ID NO: 47961 - protein, 15 aa, Artificial Sequence
  Peptide Derived from Human Papillomavirus
LRKYADHYSEISSTW

SEQ ID NO: 47962 - protein, 15 aa, Artificial Sequence
  Peptide Derived from Human Papillomavirus
LSALQDKILDHYEND

SEQ ID NO: 47963 - protein, 15 aa, Artificial Sequence
  Peptide Derived from Human Papillomavirus
MNYVVWDSIYYITET

SEQ ID NO: 47964 - protein, 15 aa, Artificial Sequence
  Peptide Derived from Human Papillomavirus
NEEWTLQDTCEELWN

SEQ ID NO: 47965 - protein, 15 aa, Artificial Sequence
  Peptide Derived from Human Papillomavirus
NPLLCSSTSNNKRRK

SEQ ID NO: 47966 - protein, 15 aa, Artificial Sequence
  Peptide Derived from Human Papillomavirus
NSQISYWQLIRLENA

SEQ ID NO: 47967 - protein, 15 aa, Artificial Sequence
  Peptide Derived from Human Papillomavirus
NTFLDVVTIPNSVQI

SEQ ID NO: 47968 - protein, 15 aa, Artificial Sequence
  Peptide Derived from Human Papillomavirus
NTHVHNPLLCSSTSN

SEQ ID NO: 47969 - protein, 15 aa, Artificial Sequence
  Peptide Derived from Human Papillomavirus
PINISKSKAHKAIEL

SEQ ID NO: 47970 - protein, 15 aa, Artificial Sequence
  Peptide Derived from Human Papillomavirus
RNTFLDVVTIPNSVQ

SEQ ID NO: 47971 - protein, 15 aa, Artificial Sequence
  Peptide Derived from Human Papillomavirus
RRKVCSGNTTPIIHL

SEQ ID NO: 47972 - protein, 15 aa, Artificial Sequence
  Peptide Derived from Human Papillomavirus
SKDINSQISYWQLIR

SEQ ID NO: 47973 - protein, 15 aa, Artificial Sequence
  Peptide Derived from Human Papillomavirus
SSTWHWTGCNKNTGI

SEQ ID NO: 47974 - protein, 15 aa, Artificial Sequence
  Peptide Derived from Human Papillomavirus
TASVGTPKPHIQTPA

SEQ ID NO: 47975 - protein, 15 aa, Artificial Sequence
  Peptide Derived from Human Papillomavirus
TGIWDKTAACVSYWG

SEQ ID NO: 47976 - protein, 15 aa, Artificial Sequence
  Peptide Derived from Human Papillomavirus
TTYYVQFKSECEKYG

SEQ ID NO: 47977 - protein, 15 aa, Artificial Sequence
  Peptide Derived from Human Papillomavirus
VPPINISKSKAHKAI

SEQ ID NO: 47978 - protein, 15 aa, Artificial Sequence
  Peptide Derived from Human Papillomavirus
VRQLQHASTSTPKTA

SEQ ID NO: 47979 - protein, 15 aa, Artificial Sequence
  Peptide Derived from Human Papillomavirus
VSYWGVYYIKDGDTT

SEQ ID NO: 47980 - protein, 15 aa, Artificial Sequence
  Peptide Derived from Human Papillomavirus
VYYIKDGDTTYYVQF

SEQ ID NO: 47981 - protein, 15 aa, Artificial Sequence
  Peptide Derived from Human Papillomavirus
WQLIRLENAILFTAR

SEQ ID NO: 47982 - protein, 15 aa, Artificial Sequence
  Peptide Derived from Human Papillomavirus
ACVYCKATLERTEVY

SEQ ID NO: 47983 - protein, 15 aa, Artificial Sequence
  Peptide Derived from Human Papillomavirus
DLFIVYRDCIAYAAC

SEQ ID NO: 47984 - protein, 15 aa, Artificial Sequence
  Peptide Derived from Human Papillomavirus
DVSIACVYCKATLER

SEQ ID NO: 47985 - protein, 15 aa, Artificial Sequence
  Peptide Derived from Human Papillomavirus
ELRYYSNSVYGETLE

SEQ ID NO: 47986 - protein, 15 aa, Artificial Sequence
  Peptide Derived from Human Papillomavirus
FIVYRDCIAYAACHK

SEQ ID NO: 47987 - protein, 15 aa, Artificial Sequence
  Peptide Derived from Human Papillomavirus
IACVYCKATLERTEV

SEQ ID NO: 47988 - protein, 15 aa, Artificial Sequence
  Peptide Derived from Human Papillomavirus
IRCLRCQKPLNPAEK

SEQ ID NO: 47989 - protein, 15 aa, Artificial Sequence
  Peptide Derived from Human Papillomavirus
KATLERTEVYQFAFK

SEQ ID NO: 47990 - protein, 15 aa, Artificial Sequence
  Peptide Derived from Human Papillomavirus
LEKITNTELYNLLIR

SEQ ID NO: 47991 - protein, 15 aa, Artificial Sequence
  Peptide Derived from Human Papillomavirus
LFIVYRDCIAYAACH

SEQ ID NO: 47992 - protein, 15 aa, Artificial Sequence
  Peptide Derived from Human Papillomavirus
LQDVSIACVYCKATL

SEQ ID NO: 47993 - protein, 15 aa, Artificial Sequence
  Peptide Derived from Human Papillomavirus
LYNLLIRCLRCQKPL

SEQ ID NO: 47994 - protein, 15 aa, Artificial Sequence
  Peptide Derived from Human Papillomavirus
NLLIRCLRCQKPLNP

SEQ ID NO: 47995 - protein, 15 aa, Artificial Sequence
  Peptide Derived from Human Papillomavirus
NTELYNLLIRCLRCQ

SEQ ID NO: 47996 - protein, 15 aa, Artificial Sequence
  Peptide Derived from Human Papillomavirus
NTSLQDVSIACVYCK

SEQ ID NO: 47997 - protein, 15 aa, Artificial Sequence
  Peptide Derived from Human Papillomavirus
PYKLPDLCTELNTSL

SEQ ID NO: 47998 - protein, 15 aa, Artificial Sequence
  Peptide Derived from Human Papillomavirus
QFAFKDLFIVYRDCI

SEQ ID NO: 47999 - protein, 15 aa, Artificial Sequence
  Peptide Derived from Human Papillomavirus
QRPYKLPDLCTELNT

SEQ ID NO: 48000 - protein, 15 aa, Artificial Sequence
  Peptide Derived from Human Papillomavirus
RDCIAYAACHKCIDF

SEQ ID NO: 48001 - protein, 15 aa, Artificial Sequence
  Peptide Derived from Human Papillomavirus
SNSVYGETLEKITNT

SEQ ID NO: 48002 - protein, 15 aa, Artificial Sequence
  Peptide Derived from Human Papillomavirus
VYQFAFKDLFIVYRD

SEQ ID NO: 48003 - protein, 15 aa, Artificial Sequence
  Peptide Derived from Human Papillomavirus
  VARIANT (1)..(3): Xaa= Any amino acid
XXXMHGPRATLQEIV

SEQ ID NO: 48004 - protein, 15 aa, Artificial Sequence
  Peptide Derived from Human Papillomavirus
ADGVSHAQLPARRAE

SEQ ID NO: 48005 - protein, 15 aa, Artificial Sequence
  Peptide Derived from Human Papillomavirus
HAQLPARRAEPQRHK

SEQ ID NO: 48006 - protein, 15 aa, Artificial Sequence
  Peptide Derived from Human Papillomavirus
LQQLFLSTLSFVCPW

SEQ ID NO: 48007 - protein, 15 aa, Artificial Sequence
  Peptide Derived from Human Papillomavirus
LRTLQQLFLSTLSFV

SEQ ID NO: 48008 - protein, 12 aa, Artificial Sequence
  Peptide Derived from Human Papillomavirus
LSFVCPWCATNQ

SEQ ID NO: 48009 - protein, 15 aa, Artificial Sequence
  Peptide Derived from Human Papillomavirus
LSTLSFVCPWCATNQ

SEQ ID NO: 48010 - protein, 15 aa, Artificial Sequence
  Peptide Derived from Human Papillomavirus
QEIVLHLEPQNELDP

SEQ ID NO: 48011 - protein, 15 aa, Artificial Sequence
  Peptide Derived from Human Papillomavirus
QNELDPVDLLCYEQL

SEQ ID NO: 48012 - protein, 15 aa, Artificial Sequence
  Peptide Derived from Human Papillomavirus
QQLFLSTLSFVCPWC

SEQ ID NO: 48013 - protein, 15 aa, Artificial Sequence
  Peptide Derived from Human Papillomavirus
RATLQEIVLHLEPQN

SEQ ID NO: 48014 - protein, 15 aa, Artificial Sequence
  Peptide Derived from Human Papillomavirus
RHKILCVCCKCDGRI

SEQ ID NO: 48015 - protein, 15 aa, Artificial Sequence
  Peptide Derived from Human Papillomavirus
RIELTVESSADDLRT

SEQ ID NO: 48016 - protein, 13 aa, Artificial Sequence
  Peptide Derived from Human Papillomavirus
TLSFVCPWCATNQ

SEQ ID NO: 48017 - protein, 15 aa, Artificial Sequence
  Peptide Derived from Human Papillomavirus
VDLLCYEQLSESEEE

SEQ ID NO: 48018 - protein, 15 aa, Artificial Sequence
  Peptide Derived from Human Papillomavirus
  VARIANT (1)..(3): Xaa= Any amino acid
XXXMAHNIIYGHGII

SEQ ID NO: 48019 - protein, 15 aa, Artificial Sequence
  Peptide Derived from Human Papillomavirus
AEVMSYIHSMNSSIL

SEQ ID NO: 48020 - protein, 15 aa, Artificial Sequence
  Peptide Derived from Human Papillomavirus
AGVMGDTVPTDLYIK

SEQ ID NO: 48021 - protein, 15 aa, Artificial Sequence
  Peptide Derived from Human Papillomavirus
ATAVITQDVRDNVSV

SEQ ID NO: 48022 - protein, 15 aa, Artificial Sequence
  Peptide Derived from Human Papillomavirus
AYQYRVFRVALPDPN

SEQ ID NO: 48023 - protein, 15 aa, Artificial Sequence
  Peptide Derived from Human Papillomavirus
CPPLELKNTIIEDGD

SEQ ID NO: 48024 - protein, 15 aa, Artificial Sequence
  Peptide Derived from Human Papillomavirus
DDYVSRTSIFYHAGS

SEQ ID NO: 48025 - protein, 15 aa, Artificial Sequence
  Peptide Derived from Human Papillomavirus
DLQFIFQLCTITLTA

SEQ ID NO: 48026 - protein, 15 aa, Artificial Sequence
  Peptide Derived from Human Papillomavirus
DLYIKGTSANMRETP

SEQ ID NO: 48027 - protein, 15 aa, Artificial Sequence
  Peptide Derived from Human Papillomavirus
DSTIYNPETQRLVWA

SEQ ID NO: 48028 - protein, 15 aa, Artificial Sequence
  Peptide Derived from Human Papillomavirus
DSTVYLPPPSVARVV

SEQ ID NO: 48029 - protein, 15 aa, Artificial Sequence
  Peptide Derived from Human Papillomavirus
EVPLDICQSICKYPD

SEQ ID NO: 48030 - protein, 15 aa, Artificial Sequence
  Peptide Derived from Human Papillomavirus
FFCLRREQLFARHFW

SEQ ID NO: 48031 - protein, 15 aa, Artificial Sequence
  Peptide Derived from Human Papillomavirus
FLQMALWRPSDSTVY

SEQ ID NO: 48032 - protein, 15 aa, Artificial Sequence
  Peptide Derived from Human Papillomavirus
FPIFLQMALWRPSDS

SEQ ID NO: 48033 - protein, 15 aa, Artificial Sequence
  Peptide Derived from Human Papillomavirus
FSTLQDTKCEVPLDI

SEQ ID NO: 48034 - protein, 15 aa, Artificial Sequence
  Peptide Derived from Human Papillomavirus
GEHWAKGTLCKPAQL

SEQ ID NO: 48035 - protein, 15 aa, Artificial Sequence
  Peptide Derived from Human Papillomavirus
GIIIFLKNVNVFPIF

SEQ ID NO: 48036 - protein, 15 aa, Artificial Sequence
  Peptide Derived from Human Papillomavirus
GMEIGRGQPLGIGLS

SEQ ID NO: 48037 - protein, 15 aa, Artificial Sequence
  Peptide Derived from Human Papillomavirus
GNPYFRVVPSGAGNK

SEQ ID NO: 48038 - protein, 15 aa, Artificial Sequence
  Peptide Derived from Human Papillomavirus
GQPLGIGLSGHPFYN

SEQ ID NO: 48039 - protein, 15 aa, Artificial Sequence
  Peptide Derived from Human Papillomavirus
GSCVYSPSPSGSITT

SEQ ID NO: 48040 - protein, 15 aa, Artificial Sequence
  Peptide Derived from Human Papillomavirus
HNIIYGHGIIIFLKN

SEQ ID NO: 48041 - protein, 15 aa, Artificial Sequence
  Peptide Derived from Human Papillomavirus
HNQLFVTVVDTTRST

SEQ ID NO: 48042 - protein, 15 aa, Artificial Sequence
  Peptide Derived from Human Papillomavirus
IFQLCTITLTAEVMS

SEQ ID NO: 48043 - protein, 15 aa, Artificial Sequence
  Peptide Derived from Human Papillomavirus
IHSMNSSILENWNFG

SEQ ID NO: 48044 - protein, 15 aa, Artificial Sequence
  Peptide Derived from Human Papillomavirus
IIFLKNVNVFPIFLQ

SEQ ID NO: 48045 - protein, 15 aa, Artificial Sequence
  Peptide Derived from Human Papillomavirus
KCEVPLDICQSICKY

SEQ ID NO: 48046 - protein, 15 aa, Artificial Sequence
  Peptide Derived from Human Papillomavirus
KFGLPDSTIYNPETQ

SEQ ID NO: 48047 - protein, 15 aa, Artificial Sequence
  Peptide Derived from Human Papillomavirus
KLKFWTVDLKEKFSS

SEQ ID NO: 48048 - protein, 15 aa, Artificial Sequence
  Peptide Derived from Human Papillomavirus
KQAVPKVSAYQYRVF

SEQ ID NO: 48049 - protein, 15 aa, Artificial Sequence
  Peptide Derived from Human Papillomavirus
LCILGCVPAIGEHWA

SEQ ID NO: 48050 - protein, 15 aa, Artificial Sequence
  Peptide Derived from Human Papillomavirus
LENWNFGVPPPPTTS

SEQ ID NO: 48051 - protein, 15 aa, Artificial Sequence
  Peptide Derived from Human Papillomavirus
LKNVNVFPIFLQMAL

SEQ ID NO: 48052 - protein, 15 aa, Artificial Sequence
  Peptide Derived from Human Papillomavirus
LQFIFQLCTITLTAE

SEQ ID NO: 48053 - protein, 15 aa, Artificial Sequence
  Peptide Derived from Human Papillomavirus
MALWRPSDSTVYLPP

SEQ ID NO: 48054 - protein, 15 aa, Artificial Sequence
  Peptide Derived from Human Papillomavirus
MSYIHSMNSSILENW

SEQ ID NO: 48055 - protein, 15 aa, Artificial Sequence
  Peptide Derived from Human Papillomavirus
NFGVPPPPTTSLVDT

SEQ ID NO: 48056 - protein, 15 aa, Artificial Sequence
  Peptide Derived from Human Papillomavirus
NIIYGHGIIIFLKNV

SEQ ID NO: 48057 - protein, 15 aa, Artificial Sequence
  Peptide Derived from Human Papillomavirus
NKPYWLHKAQGHNNG

SEQ ID NO: 48058 - protein, 15 aa, Artificial Sequence
  Peptide Derived from Human Papillomavirus
NPYFRVVPSGAGNKQ

SEQ ID NO: 48059 - protein, 15 aa, Artificial Sequence
  Peptide Derived from Human Papillomavirus
NTIIEDGDMVDTGYG

SEQ ID NO: 48060 - protein, 15 aa, Artificial Sequence
  Peptide Derived from Human Papillomavirus
NVNVFPIFLQMALWR

SEQ ID NO: 48061 - protein, 15 aa, Artificial Sequence
  Peptide Derived from Human Papillomavirus
NVSVDYKQTQLCILG

SEQ ID NO: 48062 - protein, 15 aa, Artificial Sequence
  Peptide Derived from Human Papillomavirus
NWNFGVPPPPTTSLV

SEQ ID NO: 48063 - protein, 15 aa, Artificial Sequence
  Peptide Derived from Human Papillomavirus
PAQLQPGDCPPLELK

SEQ ID NO: 48064 - protein, 15 aa, Artificial Sequence
  Peptide Derived from Human Papillomavirus
PLDICQSICKYPDYL

SEQ ID NO: 48065 - protein, 15 aa, Artificial Sequence
  Peptide Derived from Human Papillomavirus
PLELKNTIIEDGDMV

SEQ ID NO: 48066 - protein, 15 aa, Artificial Sequence
  Peptide Derived from Human Papillomavirus
PNKFGLPDSTIYNPE

SEQ ID NO: 48067 - protein, 15 aa, Artificial Sequence
  Peptide Derived from Human Papillomavirus
PTDLYIKGTSANMRE

SEQ ID NO: 48068 - protein, 15 aa, Artificial Sequence
  Peptide Derived from Human Papillomavirus
QAGLRRRPTIGPRKR

SEQ ID NO: 48069 - protein, 15 aa, Artificial Sequence
  Peptide Derived from Human Papillomavirus
QFIFQLCTITLTAEV

SEQ ID NO: 48070 - protein, 15 aa, Artificial Sequence
  Peptide Derived from Human Papillomavirus
QLCILGCVPAIGEHW

SEQ ID NO: 48071 - protein, 15 aa, Artificial Sequence
  Peptide Derived from Human Papillomavirus
QLFVTVVDTTRSTNL

SEQ ID NO: 48072 - protein, 15 aa, Artificial Sequence
  Peptide Derived from Human Papillomavirus
QTQLCILGCVPAIGE

SEQ ID NO: 48073 - protein, 15 aa, Artificial Sequence
  Peptide Derived from Human Papillomavirus
QYPLGRKFLVQAGLR

SEQ ID NO: 48074 - protein, 15 aa, Artificial Sequence
  Peptide Derived from Human Papillomavirus
QYRVFRVALPDPNKF

SEQ ID NO: 48075 - protein, 15 aa, Artificial Sequence
  Peptide Derived from Human Papillomavirus
RAGVMGDTVPTDLYI

SEQ ID NO: 48076 - protein, 15 aa, Artificial Sequence
  Peptide Derived from Human Papillomavirus
RHFWNRAGVMGDTVP

SEQ ID NO: 48077 - protein, 15 aa, Artificial Sequence
  Peptide Derived from Human Papillomavirus
RKFLVQAGLRRRPTI

SEQ ID NO: 48078 - protein, 15 aa, Artificial Sequence
  Peptide Derived from Human Papillomavirus
RLVWACVGMEIGRGQ

SEQ ID NO: 48079 - protein, 15 aa, Artificial Sequence
  Peptide Derived from Human Papillomavirus
SCVYSPSPSGSITTS

SEQ ID NO: 48080 - protein, 15 aa, Artificial Sequence
  Peptide Derived from Human Papillomavirus
SGSITTSDSQLFNKP

SEQ ID NO: 48081 - protein, 15 aa, Artificial Sequence
  Peptide Derived from Human Papillomavirus
SIFYHAGSSRLLTVG

SEQ ID NO: 48082 - protein, 15 aa, Artificial Sequence
  Peptide Derived from Human Papillomavirus
SRHVEEYDLQFIFQL

SEQ ID NO: 48083 - protein, 15 aa, Artificial Sequence
  Peptide Derived from Human Papillomavirus
SRLLTVGNPYFRVVP

SEQ ID NO: 48084 - protein, 15 aa, Artificial Sequence
  Peptide Derived from Human Papillomavirus
SSDLDQYPLGRKFLV

SEQ ID NO: 48085 - protein, 15 aa, Artificial Sequence
  Peptide Derived from Human Papillomavirus
STNLTLCASTQNPVP

SEQ ID NO: 48086 - protein, 15 aa, Artificial Sequence
  Peptide Derived from Human Papillomavirus
STVYLPPPSVARVVN

SEQ ID NO: 48087 - protein, 15 aa, Artificial Sequence
  Peptide Derived from Human Papillomavirus
SVDYKQTQLCILGCV

SEQ ID NO: 48088 - protein, 15 aa, Artificial Sequence
  Peptide Derived from Human Papillomavirus
TDDYVSRTSIFYHAG

SEQ ID NO: 48089 - protein, 15 aa, Artificial Sequence
  Peptide Derived from Human Papillomavirus
TDLYIKGTSANMRET

SEQ ID NO: 48090 - protein, 15 aa, Artificial Sequence
  Peptide Derived from Human Papillomavirus
TITLTAEVMSYIHSM

SEQ ID NO: 48091 - protein, 15 aa, Artificial Sequence
  Peptide Derived from Human Papillomavirus
TQDVRDNVSVDYKQT

SEQ ID NO: 48092 - protein, 15 aa, Artificial Sequence
  Peptide Derived from Human Papillomavirus
TQRLVWACVGMEIGR

SEQ ID NO: 48093 - protein, 15 aa, Artificial Sequence
  Peptide Derived from Human Papillomavirus
TSIFYHAGSSRLLTV

SEQ ID NO: 48094 - protein, 15 aa, Artificial Sequence
  Peptide Derived from Human Papillomavirus
TVDLKEKFSSDLDQY

SEQ ID NO: 48095 - protein, 15 aa, Artificial Sequence
  Peptide Derived from Human Papillomavirus
TVYLPPPSVARVVNT

SEQ ID NO: 48096 - protein, 15 aa, Artificial Sequence
  Peptide Derived from Human Papillomavirus
TYRFVQSVAVTCQKD

SEQ ID NO: 48097 - protein, 15 aa, Artificial Sequence
  Peptide Derived from Human Papillomavirus
VDTYRFVQSVAVTCQ

SEQ ID NO: 48098 - protein, 15 aa, Artificial Sequence
  Peptide Derived from Human Papillomavirus
VEEYDLQFIFQLCTI

SEQ ID NO: 48099 - protein, 15 aa, Artificial Sequence
  Peptide Derived from Human Papillomavirus
VFPIFLQMALWRPSD

SEQ ID NO: 48100 - protein, 15 aa, Artificial Sequence
  Peptide Derived from Human Papillomavirus
VFRVALPDPNKFGLP

SEQ ID NO: 48101 - protein, 15 aa, Artificial Sequence
  Peptide Derived from Human Papillomavirus
VPAIGEHWAKGTLCK

SEQ ID NO: 48102 - protein, 15 aa, Artificial Sequence
  Peptide Derived from Human Papillomavirus
VTVVDTTRSTNLTLC

SEQ ID NO: 48103 - protein, 15 aa, Artificial Sequence
  Peptide Derived from Human Papillomavirus
YDKLKFWTVDLKEKF

SEQ ID NO: 48104 - protein, 15 aa, Artificial Sequence
  Peptide Derived from Human Papillomavirus
YFRVVPSGAGNKQAV

SEQ ID NO: 48105 - protein, 15 aa, Artificial Sequence
  Peptide Derived from Human Papillomavirus
YGAMDFSTLQDTKCE

SEQ ID NO: 48106 - protein, 15 aa, Artificial Sequence
  Peptide Derived from Human Papillomavirus
YNKLDDTESAHAATA

SEQ ID NO: 48107 - protein, 15 aa, Artificial Sequence
  Peptide Derived from Human Papillomavirus
YPDYLQMSADPYGDS

SEQ ID NO: 48108 - protein, 15 aa, Artificial Sequence
  Peptide Derived from Human Papillomavirus
YRFVQSVAVTCQKDT

SEQ ID NO: 48109 - protein, 15 aa, Artificial Sequence
  Peptide Derived from Human Papillomavirus
YRVFRVALPDPNKFG

SEQ ID NO: 48110 - protein, 15 aa, Artificial Sequence
  Peptide Derived from Human Papillomavirus
  VARIANT (1)..(3): Xaa= Any amino acid
XXXMVSHRAARRKRA

SEQ ID NO: 48111 - protein, 15 aa, Artificial Sequence
  Peptide Derived from Human Papillomavirus
  VARIANT (1)..(2): Xaa= Any amino acid
XXMVSHRAARRKRAS

SEQ ID NO: 48112 - protein, 15 aa, Artificial Sequence
  Peptide Derived from Human Papillomavirus
ADKILQWSSLGIFLG

SEQ ID NO: 48113 - protein, 15 aa, Artificial Sequence
  Peptide Derived from Human Papillomavirus
ASSYSNVTVPLTSAW

SEQ ID NO: 48114 - protein, 15 aa, Artificial Sequence
  Peptide Derived from Human Papillomavirus
DIILPSHTPMWPSTS

SEQ ID NO: 48115 - protein, 15 aa, Artificial Sequence
  Peptide Derived from Human Papillomavirus
DKILQWSSLGIFLGG

SEQ ID NO: 48116 - protein, 15 aa, Artificial Sequence
  Peptide Derived from Human Papillomavirus
DSDLFDVYADFPPPA

SEQ ID NO: 48117 - protein, 15 aa, Artificial Sequence
  Peptide Derived from Human Papillomavirus
DSSVVASGAPVPTFT

SEQ ID NO: 48118 - protein, 15 aa, Artificial Sequence
  Peptide Derived from Human Papillomavirus
DTTLSFEPTSNVPDS

SEQ ID NO: 48119 - protein, 15 aa, Artificial Sequence
  Peptide Derived from Human Papillomavirus
EIELQPLISATNDSD

SEQ ID NO: 48120 - protein, 15 aa, Artificial Sequence
  Peptide Derived from Human Papillomavirus
EIPLQTFASSGSGTE

SEQ ID NO: 48121 - protein, 15 aa, Artificial Sequence
  Peptide Derived from Human Papillomavirus
FDVYADFPPPASTTP

SEQ ID NO: 48122 - protein, 15 aa, Artificial Sequence
  Peptide Derived from Human Papillomavirus
FSRLGQRATMFTRSG

SEQ ID NO: 48123 - protein, 15 aa, Artificial Sequence
  Peptide Derived from Human Papillomavirus
GFEITSSGTTTPAVL

SEQ ID NO: 48124 - protein, 15 aa, Artificial Sequence
  Peptide Derived from Human Papillomavirus
GIFLGGLGIGTGSGS

SEQ ID NO: 48125 - protein, 15 aa, Artificial Sequence
  Peptide Derived from Human Papillomavirus
GNIFVGTPTSGSHGY

SEQ ID NO: 48126 - protein, 15 aa, Artificial Sequence
  Peptide Derived from Human Papillomavirus
GTTLADKILQWSSLG

SEQ ID NO: 48127 - protein, 15 aa, Artificial Sequence
  Peptide Derived from Human Papillomavirus
HTPMWPSTSPTNAST

SEQ ID NO: 48128 - protein, 15 aa, Artificial Sequence
  Peptide Derived from Human Papillomavirus
IEPVGPTDPSIVTLV

SEQ ID NO: 48129 - protein, 15 aa, Artificial Sequence
  Peptide Derived from Human Papillomavirus
IIRLHRPALSSRRGT

SEQ ID NO: 48130 - protein, 15 aa, Artificial Sequence
  Peptide Derived from Human Papillomavirus
ILQWSSLGIFLGGLG

SEQ ID NO: 48131 - protein, 15 aa, Artificial Sequence
  Peptide Derived from Human Papillomavirus
INKVEGTTLADKILQ

SEQ ID NO: 48132 - protein, 15 aa, Artificial Sequence
  Peptide Derived from Human Papillomavirus
IVTLVEDSSVVASGA

SEQ ID NO: 48133 - protein, 15 aa, Artificial Sequence
  Peptide Derived from Human Papillomavirus
KYSLTMPSTAASSYS

SEQ ID NO: 48134 - protein, 15 aa, Artificial Sequence
  Peptide Derived from Human Papillomavirus
LFDVYADFPPPASTT

SEQ ID NO: 48135 - protein, 15 aa, Artificial Sequence
  Peptide Derived from Human Papillomavirus
LQTFASSGSGTEPIS

SEQ ID NO: 48136 - protein, 15 aa, Artificial Sequence
  Peptide Derived from Human Papillomavirus
LWPWYYYFPKKRKRI

SEQ ID NO: 48137 - protein, 15 aa, Artificial Sequence
  Peptide Derived from Human Papillomavirus
MDIIRLHRPALSSRR

SEQ ID NO: 48138 - protein, 15 aa, Artificial Sequence
  Peptide Derived from Human Papillomavirus
NIFVGTPTSGSHGYE

SEQ ID NO: 48139 - protein, 15 aa, Artificial Sequence
  Peptide Derived from Human Papillomavirus
NPAFSDPSIIEVPQT

SEQ ID NO: 48140 - protein, 15 aa, Artificial Sequence
  Peptide Derived from Human Papillomavirus
NPAYEPLDTTLSFEP

SEQ ID NO: 48141 - protein, 15 aa, Artificial Sequence
  Peptide Derived from Human Papillomavirus
NQQVRVSTSQFLTHP

SEQ ID NO: 48142 - protein, 15 aa, Artificial Sequence
  Peptide Derived from Human Papillomavirus
NTVVDVGPTRPPVVI

SEQ ID NO: 48143 - protein, 15 aa, Artificial Sequence
  Peptide Derived from Human Papillomavirus
NVTVPLTSAWDVPIY

SEQ ID NO: 48144 - protein, 15 aa, Artificial Sequence
  Peptide Derived from Human Papillomavirus
PAVLDITPTVDSVSI

SEQ ID NO: 48145 - protein, 15 aa, Artificial Sequence
  Peptide Derived from Human Papillomavirus
PDIILPSHTPMWPST

SEQ ID NO: 48146 - protein, 15 aa, Artificial Sequence
  Peptide Derived from Human Papillomavirus
PSIIEVPQTGEVSGN

SEQ ID NO: 48147 - protein, 15 aa, Artificial Sequence
  Peptide Derived from Human Papillomavirus
PSTIHKSFTYPKYSL

SEQ ID NO: 48148 - protein, 15 aa, Artificial Sequence
  Peptide Derived from Human Papillomavirus
PVVIEPVGPTDPSIV

SEQ ID NO: 48149 - protein, 15 aa, Artificial Sequence
  Peptide Derived from Human Papillomavirus
RGTVRFSRLGQRATM

SEQ ID NO: 48150 - protein, 15 aa, Artificial Sequence
  Peptide Derived from Human Papillomavirus
RKRIPYFFADGFVAA

SEQ ID NO: 48151 - protein, 15 aa, Artificial Sequence
  Peptide Derived from Human Papillomavirus
RPPVVIEPVGPTDPS

SEQ ID NO: 48152 - protein, 15 aa, Artificial Sequence
  Peptide Derived from Human Papillomavirus
RVHFYHDISPIAATE

SEQ ID NO: 48153 - protein, 15 aa, Artificial Sequence
  Peptide Derived from Human Papillomavirus
SDFMDIIRLHRPALS

SEQ ID NO: 48154 - protein, 15 aa, Artificial Sequence
  Peptide Derived from Human Papillomavirus
SFTYPKYSLTMPSTA

SEQ ID NO: 48155 - protein, 15 aa, Artificial Sequence
  Peptide Derived from Human Papillomavirus
SGNIFVGTPTSGSHG

SEQ ID NO: 48156 - protein, 15 aa, Artificial Sequence
  Peptide Derived from Human Papillomavirus
SHGYEEIPLQTFASS

SEQ ID NO: 48157 - protein, 15 aa, Artificial Sequence
  Peptide Derived from Human Papillomavirus
SLGIFLGGLGIGTGS

SEQ ID NO: 48158 - protein, 15 aa, Artificial Sequence
  Peptide Derived from Human Papillomavirus
SLTMPSTAASSYSNV

SEQ ID NO: 48159 - protein, 15 aa, Artificial Sequence
  Peptide Derived from Human Papillomavirus
SNTVVDVGPTRPPVV

SEQ ID NO: 48160 - protein, 15 aa, Artificial Sequence
  Peptide Derived from Human Papillomavirus
SQFLTHPSSLVTFDN

SEQ ID NO: 48161 - protein, 15 aa, Artificial Sequence
  Peptide Derived from Human Papillomavirus
SSLVTFDNPAYEPLD

SEQ ID NO: 48162 - protein, 15 aa, Artificial Sequence
  Peptide Derived from Human Papillomavirus
SSVVASGAPVPTFTG

SEQ ID NO: 48163 - protein, 15 aa, Artificial Sequence
  Peptide Derived from Human Papillomavirus
TEEIELQPLISATND

SEQ ID NO: 48164 - protein, 15 aa, Artificial Sequence
  Peptide Derived from Human Papillomavirus
TEPISSTPLPTVRRV

SEQ ID NO: 48165 - protein, 15 aa, Artificial Sequence
  Peptide Derived from Human Papillomavirus
TPAVLDITPTVDSVS

SEQ ID NO: 48166 - protein, 15 aa, Artificial Sequence
  Peptide Derived from Human Papillomavirus
TPMWPSTSPTNASTT

SEQ ID NO: 48167 - protein, 15 aa, Artificial Sequence
  Peptide Derived from Human Papillomavirus
TPTVDSVSISSTSFT

SEQ ID NO: 48168 - protein, 15 aa, Artificial Sequence
  Peptide Derived from Human Papillomavirus
TSGFEITSSGTTTPA

SEQ ID NO: 48169 - protein, 15 aa, Artificial Sequence
  Peptide Derived from Human Papillomavirus
TSQFLTHPSSLVTFD

SEQ ID NO: 48170 - protein, 15 aa, Artificial Sequence
  Peptide Derived from Human Papillomavirus
TTYIGIHGTQYYLWP

SEQ ID NO: 48171 - protein, 15 aa, Artificial Sequence
  Peptide Derived from Human Papillomavirus
VDSVSISSTSFTNPA

SEQ ID NO: 48172 - protein, 15 aa, Artificial Sequence
  Peptide Derived from Human Papillomavirus
VHFYHDISPIAATEE

SEQ ID NO: 48173 - protein, 15 aa, Artificial Sequence
  Peptide Derived from Human Papillomavirus
VPIYTGPDIILPSHT

SEQ ID NO: 48174 - protein, 15 aa, Artificial Sequence
  Peptide Derived from Human Papillomavirus
VRRVRGPRLYSRANQ

SEQ ID NO: 48175 - protein, 15 aa, Artificial Sequence
  Peptide Derived from Human Papillomavirus
VTLVEDSSVVASGAP

SEQ ID NO: 48176 - protein, 15 aa, Artificial Sequence
  Peptide Derived from Human Papillomavirus
VVDVGPTRPPVVIEP

SEQ ID NO: 48177 - protein, 15 aa, Artificial Sequence
  Peptide Derived from Human Papillomavirus
YADFPPPASTTPSTI

SEQ ID NO: 48178 - protein, 15 aa, Artificial Sequence
  Peptide Derived from Human Papillomavirus
YEPLDTTLSFEPTSN

SEQ ID NO: 48179 - protein, 15 aa, Artificial Sequence
  Peptide Derived from Human Papillomavirus
YHDISPIAATEEIEL

SEQ ID NO: 48180 - protein, 15 aa, Artificial Sequence
  Peptide Derived from Human Papillomavirus
YPKYSLTMPSTAASS

SEQ ID NO: 48181 - protein, 15 aa, Artificial Sequence
  Peptide Derived from Human Papillomavirus
YSNVTVPLTSAWDVP

SEQ ID NO: 48182 - protein, 15 aa, Artificial Sequence
  Peptide Derived from Human Papillomavirus
  VARIANT (1)..(2): Xaa= Any amino acid
XXMVPCLQVCKAKAC

SEQ ID NO: 48183 - protein, 15 aa, Artificial Sequence
  Peptide Derived from Human Papillomavirus
AKKFGCKNIWEVHME

SEQ ID NO: 48184 - protein, 15 aa, Artificial Sequence
  Peptide Derived from Human Papillomavirus
CEELWLTEPKKCFKK

SEQ ID NO: 48185 - protein, 15 aa, Artificial Sequence
  Peptide Derived from Human Papillomavirus
CKNIWEVHMENESIY

SEQ ID NO: 48186 - protein, 15 aa, Artificial Sequence
  Peptide Derived from Human Papillomavirus
CLQVCKAKACSAIEV

SEQ ID NO: 48187 - protein, 15 aa, Artificial Sequence
  Peptide Derived from Human Papillomavirus
CSAIEVQIALESLST

SEQ ID NO: 48188 - protein, 15 aa, Artificial Sequence
  Peptide Derived from Human Papillomavirus
CSGVDYRGIYYVHDG

SEQ ID NO: 48189 - protein, 15 aa, Artificial Sequence
  Peptide Derived from Human Papillomavirus
DCGWQKVCSGVDYRG

SEQ ID NO: 48190 - protein, 15 aa, Artificial Sequence
  Peptide Derived from Human Papillomavirus
ESIYCPDSVSSTCRY

SEQ ID NO: 48191 - protein, 15 aa, Artificial Sequence
  Peptide Derived from Human Papillomavirus
EVHMENESIYCPDSV

SEQ ID NO: 48192 - protein, 15 aa, Artificial Sequence
  Peptide Derived from Human Papillomavirus
EVQIALESLSTTIYN

SEQ ID NO: 48193 - protein, 15 aa, Artificial Sequence
  Peptide Derived from Human Papillomavirus
FQKYKTLFVDVTSTY

SEQ ID NO: 48194 - protein, 15 aa, Artificial Sequence
  Peptide Derived from Human Papillomavirus
HIEVWFDGSKNNCMQ

SEQ ID NO: 48195 - protein, 15 aa, Artificial Sequence
  Peptide Derived from Human Papillomavirus
ITIIYKDETQRNSFL

SEQ ID NO: 48196 - protein, 12 aa, Artificial Sequence
  Peptide Derived from Human Papillomavirus
KIPVVYRLVWDK

SEQ ID NO: 48197 - protein, 15 aa, Artificial Sequence
  Peptide Derived from Human Papillomavirus
KTLFVDVTSTYHWTS

SEQ ID NO: 48198 - protein, 15 aa, Artificial Sequence
  Peptide Derived from Human Papillomavirus
KYIYYNGDCGWQKVC

SEQ ID NO: 48199 - protein, 15 aa, Artificial Sequence
  Peptide Derived from Human Papillomavirus
LSHVKIPVVYRLVWD

SEQ ID NO: 48200 - protein, 15 aa, Artificial Sequence
  Peptide Derived from Human Papillomavirus
MQYVAWKYIYYNGDC

SEQ ID NO: 48201 - protein, 15 aa, Artificial Sequence
  Peptide Derived from Human Papillomavirus
NEEWTLRDTCEELWL

SEQ ID NO: 48202 - protein, 15 aa, Artificial Sequence
  Peptide Derived from Human Papillomavirus
NESIYCPDSVSSTCR

SEQ ID NO: 48203 - protein, 15 aa, Artificial Sequence
  Peptide Derived from Human Papillomavirus
NKNYSIITIIYKDET

SEQ ID NO: 48204 - protein, 15 aa, Artificial Sequence
  Peptide Derived from Human Papillomavirus
NSFLSHVKIPVVYRL

SEQ ID NO: 48205 - protein, 15 aa, Artificial Sequence
  Peptide Derived from Human Papillomavirus
QIALESLSTTIYNNE

SEQ ID NO: 48206 - protein, 15 aa, Artificial Sequence
  Peptide Derived from Human Papillomavirus
RYNVSPVETVNEYNT

SEQ ID NO: 48207 - protein, 15 aa, Artificial Sequence
  Peptide Derived from Human Papillomavirus
RYRFQKYKTLFVDVT

SEQ ID NO: 48208 - protein, 15 aa, Artificial Sequence
  Peptide Derived from Human Papillomavirus
STSVGNQDAAVSHRP

SEQ ID NO: 48209 - protein, 15 aa, Artificial Sequence
  Peptide Derived from Human Papillomavirus
TCRYNVSPVETVNEY

SEQ ID NO: 48210 - protein, 15 aa, Artificial Sequence
  Peptide Derived from Human Papillomavirus
TLFVDVTSTYHWTST

SEQ ID NO: 48211 - protein, 15 aa, Artificial Sequence
  Peptide Derived from Human Papillomavirus
TSTYHWTSTDNKNYS

SEQ ID NO: 48212 - protein, 15 aa, Artificial Sequence
  Peptide Derived from Human Papillomavirus
VETVNEYNTHKTTTT

SEQ ID NO: 48213 - protein, 15 aa, Artificial Sequence
  Peptide Derived from Human Papillomavirus
VNEYNTHKTTTTTST

SEQ ID NO: 48214 - protein, 15 aa, Artificial Sequence
  Peptide Derived from Human Papillomavirus
VPCLQVCKAKACSAI

SEQ ID NO: 48215 - protein, 15 aa, Artificial Sequence
  Peptide Derived from Human Papillomavirus
YKTLFVDVTSTYHWT

SEQ ID NO: 48216 - protein, 15 aa, Artificial Sequence
  Peptide Derived from Human Papillomavirus
AEVYNFACTELKLVY

SEQ ID NO: 48217 - protein, 15 aa, Artificial Sequence
  Peptide Derived from Human Papillomavirus
AHGWTGSCLGCWRQT

SEQ ID NO: 48218 - protein, 15 aa, Artificial Sequence
  Peptide Derived from Human Papillomavirus
DFPYAVCRVCLLFYS

SEQ ID NO: 48219 - protein, 15 aa, Artificial Sequence
  Peptide Derived from Human Papillomavirus
DLLIRCYRCQSPLTP

SEQ ID NO: 48220 - protein, 15 aa, Artificial Sequence
  Peptide Derived from Human Papillomavirus
DLRLSCVYCKKELTR

SEQ ID NO: 48221 - protein, 15 aa, Artificial Sequence
  Peptide Derived from Human Papillomavirus
DYSVYGATLESITKK

SEQ ID NO: 48222 - protein, 15 aa, Artificial Sequence
  Peptide Derived from Human Papillomavirus
EIPLIDLRLSCVYCK

SEQ ID NO: 48223 - protein, 15 aa, Artificial Sequence
  Peptide Derived from Human Papillomavirus
FHLIAHGWTGSCLGC

SEQ ID NO: 48224 - protein, 15 aa, Artificial Sequence
  Peptide Derived from Human Papillomavirus
IPLIDLRLSCVYCKK

SEQ ID NO: 48225 - protein, 15 aa, Artificial Sequence
  Peptide Derived from Human Papillomavirus
IRCYRCQSPLTPEEK

SEQ ID NO: 48226 - protein, 15 aa, Artificial Sequence
  Peptide Derived from Human Papillomavirus
KKELTRAEVYNFACT

SEQ ID NO: 48227 - protein, 15 aa, Artificial Sequence
  Peptide Derived from Human Papillomavirus
KKQLCDLLIRCYRCQ

SEQ ID NO: 48228 - protein, 15 aa, Artificial Sequence
  Peptide Derived from Human Papillomavirus
KLVYRDDFPYAVCRV

SEQ ID NO: 48229 - protein, 15 aa, Artificial Sequence
  Peptide Derived from Human Papillomavirus
KYRYYDYSVYGATLE

SEQ ID NO: 48230 - protein, 15 aa, Artificial Sequence
  Peptide Derived from Human Papillomavirus
LESITKKQLCDLLIR

SEQ ID NO: 48231 - protein, 15 aa, Artificial Sequence
  Peptide Derived from Human Papillomavirus
LIDLRLSCVYCKKEL

SEQ ID NO: 48232 - protein, 15 aa, Artificial Sequence
  Peptide Derived from Human Papillomavirus
LSEVLEIPLIDLRLS

SEQ ID NO: 48233 - protein, 15 aa, Artificial Sequence
  Peptide Derived from Human Papillomavirus
PYAVCRVCLLFYSKV

SEQ ID NO: 48234 - protein, 15 aa, Artificial Sequence
  Peptide Derived from Human Papillomavirus
RAEVYNFACTELKLV

SEQ ID NO: 48235 - protein, 15 aa, Artificial Sequence
  Peptide Derived from Human Papillomavirus
RDDFPYAVCRVCLLF

SEQ ID NO: 48236 - protein, 15 aa, Artificial Sequence
  Peptide Derived from Human Papillomavirus
SCVYCKKELTRAEVY

SEQ ID NO: 48237 - protein, 15 aa, Artificial Sequence
  Peptide Derived from Human Papillomavirus
SEVLEIPLIDLRLSC

SEQ ID NO: 48238 - protein, 15 aa, Artificial Sequence
  Peptide Derived from Human Papillomavirus
VCLLFYSKVRKYRYY

SEQ ID NO: 48239 - protein, 15 aa, Artificial Sequence
  Peptide Derived from Human Papillomavirus
VLEIPLIDLRLSCVY

SEQ ID NO: 48240 - protein, 15 aa, Artificial Sequence
  Peptide Derived from Human Papillomavirus
VYNFACTELKLVYRD

SEQ ID NO: 48241 - protein, 15 aa, Artificial Sequence
  Peptide Derived from Human Papillomavirus
YYDYSVYGATLESIT

SEQ ID NO: 48242 - protein, 15 aa, Artificial Sequence
  Peptide Derived from Human Papillomavirus
  VARIANT (1)..(3): Xaa= Any amino acid
XXXMHGKVPTLQDVV

SEQ ID NO: 48243 - protein, 13 aa, Artificial Sequence
  Peptide Derived from Human Papillomavirus
ALTVTCPLCASSN

SEQ ID NO: 48244 - protein, 15 aa, Artificial Sequence
  Peptide Derived from Human Papillomavirus
CKFVVQLDIQSTKED

SEQ ID NO: 48245 - protein, 15 aa, Artificial Sequence
  Peptide Derived from Human Papillomavirus
CYLIHVPCCECKFVV

SEQ ID NO: 48246 - protein, 15 aa, Artificial Sequence
  Peptide Derived from Human Papillomavirus
DLRVVQQLLMGALTV

SEQ ID NO: 48247 - protein, 15 aa, Artificial Sequence
  Peptide Derived from Human Papillomavirus
HTCYLIHVPCCECKF

SEQ ID NO: 48248 - protein, 15 aa, Artificial Sequence
  Peptide Derived from Human Papillomavirus
LIHVPCCECKFVVQL

SEQ ID NO: 48249 - protein, 15 aa, Artificial Sequence
  Peptide Derived from Human Papillomavirus
LQDVVLELTPQTEID

SEQ ID NO: 48250 - protein, 15 aa, Artificial Sequence
  Peptide Derived from Human Papillomavirus
LRVVQQLLMGALTVT

SEQ ID NO: 48251 - protein, 15 aa, Artificial Sequence
  Peptide Derived from Human Papillomavirus
MGALTVTCPLCASSN

SEQ ID NO: 48252 - protein, 15 aa, Artificial Sequence
  Peptide Derived from Human Papillomavirus
QDVVLELTPQTEIDL

SEQ ID NO: 48253 - protein, 15 aa, Artificial Sequence
  Peptide Derived from Human Papillomavirus
QLLMGALTVTCPLCA

SEQ ID NO: 48254 - protein, 15 aa, Artificial Sequence
  Peptide Derived from Human Papillomavirus
QQLLMGALTVTCPLC

SEQ ID NO: 48255 - protein, 15 aa, Artificial Sequence
  Peptide Derived from Human Papillomavirus
TCYLIHVPCCECKFV

SEQ ID NO: 48256 - protein, 15 aa, Artificial Sequence
  Peptide Derived from Human Papillomavirus
VPTLQDVVLELTPQT

SEQ ID NO: 48257 - protein, 15 aa, Artificial Sequence
  Peptide Derived from Human Papillomavirus
VQQLLMGALTVTCPL

SEQ ID NO: 48258 - protein, 15 aa, Artificial Sequence
  Peptide Derived from Human Papillomavirus
VVQLDIQSTKEDLRV

SEQ ID NO: 48259 - protein, 15 aa, Artificial Sequence
  Peptide Derived from Human Papillomavirus
  VARIANT (1)..(3): Xaa= Any amino acid
XXXMMLPMMYIYRDP

SEQ ID NO: 48260 - protein, 15 aa, Artificial Sequence
  Peptide Derived from Human Papillomavirus
  VARIANT (1)..(1): Xaa= Any amino acid
XMMLPMMYIYRDPPL

SEQ ID NO: 48261 - protein, 15 aa, Artificial Sequence
  Peptide Derived from Human Papillomavirus
AGKVGETIPAELYLK

SEQ ID NO: 48262 - protein, 15 aa, Artificial Sequence
  Peptide Derived from Human Papillomavirus
ANLLEDWNIGLSPPV

SEQ ID NO: 48263 - protein, 15 aa, Artificial Sequence
  Peptide Derived from Human Papillomavirus
AVNVFPIFLQMATWR

SEQ ID NO: 48264 - protein, 15 aa, Artificial Sequence
  Peptide Derived from Human Papillomavirus
AYQYRVFRVRLPDPN

SEQ ID NO: 48265 - protein, 15 aa, Artificial Sequence
  Peptide Derived from Human Papillomavirus
CIFLDVGAVNVFPIF

SEQ ID NO: 48266 - protein, 15 aa, Artificial Sequence
  Peptide Derived from Human Papillomavirus
CPPLALINTPIEDGD

SEQ ID NO: 48267 - protein, 15 aa, Artificial Sequence
  Peptide Derived from Human Papillomavirus
DPPLHYGLCIFLDVG

SEQ ID NO: 48268 - protein, 15 aa, Artificial Sequence
  Peptide Derived from Human Papillomavirus
DSYVKRTSIFYHAGS

SEQ ID NO: 48269 - protein, 15 aa, Artificial Sequence
  Peptide Derived from Human Papillomavirus
DVNLQDSFSTDLDQF

SEQ ID NO: 48270 - protein, 15 aa, Artificial Sequence
  Peptide Derived from Human Papillomavirus
DWNIGLSPPVATSLE

SEQ ID NO: 48271 - protein, 15 aa, Artificial Sequence
  Peptide Derived from Human Papillomavirus
EDKYRYVRSTAITCQ

SEQ ID NO: 48272 - protein, 15 aa, Artificial Sequence
  Peptide Derived from Human Papillomavirus
ELQFVFQLCKITLSA

SEQ ID NO: 48273 - protein, 15 aa, Artificial Sequence
  Peptide Derived from Human Papillomavirus
ENKVYLPPTPVSKVV

SEQ ID NO: 48274 - protein, 15 aa, Artificial Sequence
  Peptide Derived from Human Papillomavirus
EVPLDIVQSTCKYPD

SEQ ID NO: 48275 - protein, 15 aa, Artificial Sequence
  Peptide Derived from Human Papillomavirus
FGAMDFKVLQESKAE

SEQ ID NO: 48276 - protein, 15 aa, Artificial Sequence
  Peptide Derived from Human Papillomavirus
FKVLQESKAEVPLDI

SEQ ID NO: 48277 - protein, 15 aa, Artificial Sequence
  Peptide Derived from Human Papillomavirus
FLDVGAVNVFPIFLQ

SEQ ID NO: 48278 - protein, 15 aa, Artificial Sequence
  Peptide Derived from Human Papillomavirus
FLQMATWRPSENKVY

SEQ ID NO: 48279 - protein, 15 aa, Artificial Sequence
  Peptide Derived from Human Papillomavirus
FNRLDDTESSNLANN

SEQ ID NO: 48280 - protein, 15 aa, Artificial Sequence
  Peptide Derived from Human Papillomavirus
FPIFLQMATWRPSEN

SEQ ID NO: 48281 - protein, 15 aa, Artificial Sequence
  Peptide Derived from Human Papillomavirus
FWDVNLQDSFSTDLD

SEQ ID NO: 48282 - protein, 15 aa, Artificial Sequence
  Peptide Derived from Human Papillomavirus
GAGLSGHPLFNRLDD

SEQ ID NO: 48283 - protein, 15 aa, Artificial Sequence
  Peptide Derived from Human Papillomavirus
GEHWTKGAVCKSTQV

SEQ ID NO: 48284 - protein, 15 aa, Artificial Sequence
  Peptide Derived from Human Papillomavirus
GLEVGRGQPLGAGLS

SEQ ID NO: 48285 - protein, 15 aa, Artificial Sequence
  Peptide Derived from Human Papillomavirus
GNQLFVTVVDTTRST

SEQ ID NO: 48286 - protein, 15 aa, Artificial Sequence
  Peptide Derived from Human Papillomavirus
GQPLGAGLSGHPLFN

SEQ ID NO: 48287 - protein, 15 aa, Artificial Sequence
  Peptide Derived from Human Papillomavirus
KAEVPLDIVQSTCKY

SEQ ID NO: 48288 - protein, 15 aa, Artificial Sequence
  Peptide Derived from Human Papillomavirus
KFGLPDTNIYNPDQE

SEQ ID NO: 48289 - protein, 15 aa, Artificial Sequence
  Peptide Derived from Human Papillomavirus
KITLSAEVMAYLHNM

SEQ ID NO: 48290 - protein, 15 aa, Artificial Sequence
  Peptide Derived from Human Papillomavirus
KTNIPKVSAYQYRVF

SEQ ID NO: 48291 - protein, 15 aa, Artificial Sequence
  Peptide Derived from Human Papillomavirus
KVYLPPTPVSKVVAT

SEQ ID NO: 48292 - protein, 15 aa, Artificial Sequence
  Peptide Derived from Human Papillomavirus
KYKFWDVNLQDSFST

SEQ ID NO: 48293 - protein, 15 aa, Artificial Sequence
  Peptide Derived from Human Papillomavirus
KYRYVRSTAITCQRE

SEQ ID NO: 48294 - protein, 15 aa, Artificial Sequence
  Peptide Derived from Human Papillomavirus
LAKYKFWDVNLQDSF

SEQ ID NO: 48295 - protein, 15 aa, Artificial Sequence
  Peptide Derived from Human Papillomavirus
LCIFLDVGAVNVFPI

SEQ ID NO: 48296 - protein, 15 aa, Artificial Sequence
  Peptide Derived from Human Papillomavirus
LCIVGCTPAMGEHWT

SEQ ID NO: 48297 - protein, 15 aa, Artificial Sequence
  Peptide Derived from Human Papillomavirus
LEDWNIGLSPPVATS

SEQ ID NO: 48298 - protein, 15 aa, Artificial Sequence
  Peptide Derived from Human Papillomavirus
LHNMNANLLEDWNIG

SEQ ID NO: 48299 - protein, 15 aa, Artificial Sequence
  Peptide Derived from Human Papillomavirus
LRHVEEYELQFVFQL

SEQ ID NO: 48300 - protein, 15 aa, Artificial Sequence
  Peptide Derived from Human Papillomavirus
LSKYDARKINQYLRH

SEQ ID NO: 48301 - protein, 15 aa, Artificial Sequence
  Peptide Derived from Human Papillomavirus
MAYLHNMNANLLEDW

SEQ ID NO: 48302 - protein, 15 aa, Artificial Sequence
  Peptide Derived from Human Papillomavirus
MMYIYRDPPLHYGLC

SEQ ID NO: 48303 - protein, 15 aa, Artificial Sequence
  Peptide Derived from Human Papillomavirus
MYIYRDPPLHYGLCI

SEQ ID NO: 48304 - protein, 15 aa, Artificial Sequence
  Peptide Derived from Human Papillomavirus
NIGLSPPVATSLEDK

SEQ ID NO: 48305 - protein, 15 aa, Artificial Sequence
  Peptide Derived from Human Papillomavirus
NISVDGKQTQLCIVG

SEQ ID NO: 48306 - protein, 15 aa, Artificial Sequence
  Peptide Derived from Human Papillomavirus
NKPYWLQRAQGHNNG

SEQ ID NO: 48307 - protein, 15 aa, Artificial Sequence
  Peptide Derived from Human Papillomavirus
NKVYLPPTPVSKVVA

SEQ ID NO: 48308 - protein, 15 aa, Artificial Sequence
  Peptide Derived from Human Papillomavirus
NTPIEDGDMIDTGFG

SEQ ID NO: 48309 - protein, 15 aa, Artificial Sequence
  Peptide Derived from Human Papillomavirus
PAELYLKGSNGREPP

SEQ ID NO: 48310 - protein, 15 aa, Artificial Sequence
  Peptide Derived from Human Papillomavirus
PLALINTPIEDGDMI

SEQ ID NO: 48311 - protein, 15 aa, Artificial Sequence
  Peptide Derived from Human Papillomavirus
PLDIVQSTCKYPDYL

SEQ ID NO: 48312 - protein, 15 aa, Artificial Sequence
  Peptide Derived from Human Papillomavirus
PMMYIYRDPPLHYGL

SEQ ID NO: 48313 - protein, 15 aa, Artificial Sequence
  Peptide Derived from Human Papillomavirus
PNKFGLPDTNIYNPD

SEQ ID NO: 48314 - protein, 15 aa, Artificial Sequence
  Peptide Derived from Human Papillomavirus
PSSVYVATPSGSMIT

SEQ ID NO: 48315 - protein, 15 aa, Artificial Sequence
  Peptide Derived from Human Papillomavirus
PTPVSKVVATDSYVK

SEQ ID NO: 48316 - protein, 15 aa, Artificial Sequence
  Peptide Derived from Human Papillomavirus
QERLVWACVGLEVGR

SEQ ID NO: 48317 - protein, 15 aa, Artificial Sequence
  Peptide Derived from Human Papillomavirus
QFPLGRKFLMQLGTR

SEQ ID NO: 48318 - protein, 15 aa, Artificial Sequence
  Peptide Derived from Human Papillomavirus
QFVFQLCKITLSAEV

SEQ ID NO: 48319 - protein, 15 aa, Artificial Sequence
  Peptide Derived from Human Papillomavirus
QLCIVGCTPAMGEHW

SEQ ID NO: 48320 - protein, 15 aa, Artificial Sequence
  Peptide Derived from Human Papillomavirus
QLFVTVVDTTRSTNM

SEQ ID NO: 48321 - protein, 15 aa, Artificial Sequence
  Peptide Derived from Human Papillomavirus
QTQLCIVGCTPAMGE

SEQ ID NO: 48322 - protein, 15 aa, Artificial Sequence
  Peptide Derived from Human Papillomavirus
QYRVFRVRLPDPNKF

SEQ ID NO: 48323 - protein, 15 aa, Artificial Sequence
  Peptide Derived from Human Papillomavirus
RKFLMQLGTRSKPAV

SEQ ID NO: 48324 - protein, 15 aa, Artificial Sequence
  Peptide Derived from Human Papillomavirus
RLVWACVGLEVGRGQ

SEQ ID NO: 48325 - protein, 15 aa, Artificial Sequence
  Peptide Derived from Human Papillomavirus
SGSMITSEAQLFNKP

SEQ ID NO: 48326 - protein, 15 aa, Artificial Sequence
  Peptide Derived from Human Papillomavirus
SIFYHAGSSRLLAVG

SEQ ID NO: 48327 - protein, 15 aa, Artificial Sequence
  Peptide Derived from Human Papillomavirus
SRLLAVGHPYYSVTK

SEQ ID NO: 48328 - protein, 15 aa, Artificial Sequence
  Peptide Derived from Human Papillomavirus
SSNLANNNVIEDSRD

SEQ ID NO: 48329 - protein, 15 aa, Artificial Sequence
  Peptide Derived from Human Papillomavirus
SSVYVATPSGSMITS

SEQ ID NO: 48330 - protein, 15 aa, Artificial Sequence
  Peptide Derived from Human Papillomavirus
STDLDQFPLGRKFLM

SEQ ID NO: 48331 - protein, 15 aa, Artificial Sequence
  Peptide Derived from Human Papillomavirus
STNMTISTATEQLSK

SEQ ID NO: 48332 - protein, 15 aa, Artificial Sequence
  Peptide Derived from Human Papillomavirus
STQVTTGDCPPLALI

SEQ ID NO: 48333 - protein, 15 aa, Artificial Sequence
  Peptide Derived from Human Papillomavirus
TDSYVKRTSIFYHAG

SEQ ID NO: 48334 - protein, 15 aa, Artificial Sequence
  Peptide Derived from Human Papillomavirus
TEQLSKYDARKINQY

SEQ ID NO: 48335 - protein, 15 aa, Artificial Sequence
  Peptide Derived from Human Papillomavirus
TPAMGEHWTKGAVCK

SEQ ID NO: 48336 - protein, 15 aa, Artificial Sequence
  Peptide Derived from Human Papillomavirus
TSIFYHAGSSRLLAV

SEQ ID NO: 48337 - protein, 15 aa, Artificial Sequence
  Peptide Derived from Human Papillomavirus
VEEYELQFVFQLCKI

SEQ ID NO: 48338 - protein, 15 aa, Artificial Sequence
  Peptide Derived from Human Papillomavirus
VFPIFLQMATWRPSE

SEQ ID NO: 48339 - protein, 15 aa, Artificial Sequence
  Peptide Derived from Human Papillomavirus
VFQLCKITLSAEVMA

SEQ ID NO: 48340 - protein, 15 aa, Artificial Sequence
  Peptide Derived from Human Papillomavirus
VFRVRLPDPNKFGLP

SEQ ID NO: 48341 - protein, 15 aa, Artificial Sequence
  Peptide Derived from Human Papillomavirus
VGAVNVFPIFLQMAT

SEQ ID NO: 48342 - protein, 15 aa, Artificial Sequence
  Peptide Derived from Human Papillomavirus
VSKVVATDSYVKRTS

SEQ ID NO: 48343 - protein, 15 aa, Artificial Sequence
  Peptide Derived from Human Papillomavirus
VTVVDTTRSTNMTIS

SEQ ID NO: 48344 - protein, 15 aa, Artificial Sequence
  Peptide Derived from Human Papillomavirus
WFYLRREQLFARHYF

SEQ ID NO: 48345 - protein, 15 aa, Artificial Sequence
  Peptide Derived from Human Papillomavirus
YPDYLKMSADAYGDS

SEQ ID NO: 48346 - protein, 15 aa, Artificial Sequence
  Peptide Derived from Human Papillomavirus
YRVFRVRLPDPNKFG

SEQ ID NO: 48347 - protein, 15 aa, Artificial Sequence
  Peptide Derived from Human Papillomavirus
YRYVRSTAITCQREQ

SEQ ID NO: 48348 - protein, 15 aa, Artificial Sequence
  Peptide Derived from Human Papillomavirus
YYSVTKDNTKTNIPK

SEQ ID NO: 48349 - protein, 15 aa, Artificial Sequence
  Peptide Derived from Human Papillomavirus
  VARIANT (1)..(3): Xaa= Any amino acid
XXXMVAHRATRRKRA

SEQ ID NO: 48350 - protein, 15 aa, Artificial Sequence
  Peptide Derived from Human Papillomavirus
  VARIANT (1)..(2): Xaa= Any amino acid
XXMVAHRATRRKRAS

SEQ ID NO: 48351 - protein, 15 aa, Artificial Sequence
  Peptide Derived from Human Papillomavirus
ADKILQWGSLFTYFG

SEQ ID NO: 48352 - protein, 15 aa, Artificial Sequence
  Peptide Derived from Human Papillomavirus
AEEIEMQPLLSANNS

SEQ ID NO: 48353 - protein, 15 aa, Artificial Sequence
  Peptide Derived from Human Papillomavirus
APGLSSQSVATPSAH

SEQ ID NO: 48354 - protein, 15 aa, Artificial Sequence
  Peptide Derived from Human Papillomavirus
ATLVSADNPLFEGTD

SEQ ID NO: 48355 - protein, 15 aa, Artificial Sequence
  Peptide Derived from Human Papillomavirus
DIVLPTGPSTWPFVP

SEQ ID NO: 48356 - protein, 15 aa, Artificial Sequence
  Peptide Derived from Human Papillomavirus
DKILQWGSLFTYFGG

SEQ ID NO: 48357 - protein, 15 aa, Artificial Sequence
  Peptide Derived from Human Papillomavirus
DPAFLDRPATLVSAD

SEQ ID NO: 48358 - protein, 15 aa, Artificial Sequence
  Peptide Derived from Human Papillomavirus
DPDFMNIVALHRPAF

SEQ ID NO: 48359 - protein, 15 aa, Artificial Sequence
  Peptide Derived from Human Papillomavirus
DTSLAFSPSGVAPDP

SEQ ID NO: 48360 - protein, 15 aa, Artificial Sequence
  Peptide Derived from Human Papillomavirus
EIEMQPLLSANNSFD

SEQ ID NO: 48361 - protein, 15 aa, Artificial Sequence
  Peptide Derived from Human Papillomavirus
EIPMQTFAVHGSGTE

SEQ ID NO: 48362 - protein, 15 aa, Artificial Sequence
  Peptide Derived from Human Papillomavirus
ESSVIESGAGIPNFT

SEQ ID NO: 48363 - protein, 15 aa, Artificial Sequence
  Peptide Derived from Human Papillomavirus
FDGLYDIYANIDDEA

SEQ ID NO: 48364 - protein, 15 aa, Artificial Sequence
  Peptide Derived from Human Papillomavirus
FQQVKVTDPAFLDRP

SEQ ID NO: 48365 - protein, 15 aa, Artificial Sequence
  Peptide Derived from Human Papillomavirus
FRRIAAPRLYRKAFQ

SEQ ID NO: 48366 - protein, 15 aa, Artificial Sequence
  Peptide Derived from Human Papillomavirus
FSRLGRKATIQTRRG

SEQ ID NO: 48367 - protein, 15 aa, Artificial Sequence
  Peptide Derived from Human Papillomavirus
FTYFGGLGIGTGTGS

SEQ ID NO: 48368 - protein, 15 aa, Artificial Sequence
  Peptide Derived from Human Papillomavirus
GFEITSSSTTTPAVL

SEQ ID NO: 48369 - protein, 15 aa, Artificial Sequence
  Peptide Derived from Human Papillomavirus
GNILISTPTSGIHSY

SEQ ID NO: 48370 - protein, 15 aa, Artificial Sequence
  Peptide Derived from Human Papillomavirus
GSSFALWPVYFFRRR

SEQ ID NO: 48371 - protein, 15 aa, Artificial Sequence
  Peptide Derived from Human Papillomavirus
HDVYIQGSSFALWPV

SEQ ID NO: 48372 - protein, 15 aa, Artificial Sequence
  Peptide Derived from Human Papillomavirus
HLPIKPSTLSFASNT

SEQ ID NO: 48373 - protein, 15 aa, Artificial Sequence
  Peptide Derived from Human Papillomavirus
HYYYDISPIAQAEEI

SEQ ID NO: 48374 - protein, 15 aa, Artificial Sequence
  Peptide Derived from Human Papillomavirus
IHSYEEIPMQTFAVH

SEQ ID NO: 48375 - protein, 15 aa, Artificial Sequence
  Peptide Derived from Human Papillomavirus
ILQWGSLFTYFGGLG

SEQ ID NO: 48376 - protein, 15 aa, Artificial Sequence
  Peptide Derived from Human Papillomavirus
IPGFRRIAAPRLYRK

SEQ ID NO: 48377 - protein, 15 aa, Artificial Sequence
  Peptide Derived from Human Papillomavirus
IVDVTPARPPIVVES

SEQ ID NO: 48378 - protein, 15 aa, Artificial Sequence
  Peptide Derived from Human Papillomavirus
IVTLVEESSVIESGA

SEQ ID NO: 48379 - protein, 15 aa, Artificial Sequence
  Peptide Derived from Human Papillomavirus
MNIVALHRPAFTTRR

SEQ ID NO: 48380 - protein, 15 aa, Artificial Sequence
  Peptide Derived from Human Papillomavirus
MQTFAVHGSGTEPIS

SEQ ID NO: 48381 - protein, 15 aa, Artificial Sequence
  Peptide Derived from Human Papillomavirus
NILISTPTSGIHSYE

SEQ ID NO: 48382 - protein, 15 aa, Artificial Sequence
  Peptide Derived from Human Papillomavirus
NPLFEGTDTSLAFSP

SEQ ID NO: 48383 - protein, 15 aa, Artificial Sequence
  Peptide Derived from Human Papillomavirus
NPLFIDPPVIEAPQT

SEQ ID NO: 48384 - protein, 15 aa, Artificial Sequence
  Peptide Derived from Human Papillomavirus
PAFLDRPATLVSADN

SEQ ID NO: 48385 - protein, 15 aa, Artificial Sequence
  Peptide Derived from Human Papillomavirus
PAVLDITPTSSTVHV

SEQ ID NO: 48386 - protein, 15 aa, Artificial Sequence
  Peptide Derived from Human Papillomavirus
PDFMNIVALHRPAFT

SEQ ID NO: 48387 - protein, 15 aa, Artificial Sequence
  Peptide Derived from Human Papillomavirus
PDIVLPTGPSTWPFV

SEQ ID NO: 48388 - protein, 15 aa, Artificial Sequence
  Peptide Derived from Human Papillomavirus
PIVVESVGPTDPSIV

SEQ ID NO: 48389 - protein, 15 aa, Artificial Sequence
  Peptide Derived from Human Papillomavirus
PLFIDPPVIEAPQTG

SEQ ID NO: 48390 - protein, 15 aa, Artificial Sequence
  Peptide Derived from Human Papillomavirus
PPVIEAPQTGEVSGN

SEQ ID NO: 48391 - protein, 15 aa, Artificial Sequence
  Peptide Derived from Human Papillomavirus
PSTIVDVTPARPPIV

SEQ ID NO: 48392 - protein, 15 aa, Artificial Sequence
  Peptide Derived from Human Papillomavirus
QKTWADKILQWGSLF

SEQ ID NO: 48393 - protein, 15 aa, Artificial Sequence
  Peptide Derived from Human Papillomavirus
QPLLSANNSFDGLYD

SEQ ID NO: 48394 - protein, 15 aa, Artificial Sequence
  Peptide Derived from Human Papillomavirus
RAGYVPLGSRPSTIV

SEQ ID NO: 48395 - protein, 15 aa, Artificial Sequence
  Peptide Derived from Human Papillomavirus
RGGVRFSRLGRKATI

SEQ ID NO: 48396 - protein, 15 aa, Artificial Sequence
  Peptide Derived from Human Papillomavirus
RKAFQQVKVTDPAFL

SEQ ID NO: 48397 - protein, 15 aa, Artificial Sequence
  Peptide Derived from Human Papillomavirus
RKRIPYFFADGDVAA

SEQ ID NO: 48398 - protein, 15 aa, Artificial Sequence
  Peptide Derived from Human Papillomavirus
RPPIVVESVGPTDPS

SEQ ID NO: 48399 - protein, 15 aa, Artificial Sequence
  Peptide Derived from Human Papillomavirus
RVHYYYDISPIAQAE

SEQ ID NO: 48400 - protein, 15 aa, Artificial Sequence
  Peptide Derived from Human Papillomavirus
SAHLPIKPSTLSFAS

SEQ ID NO: 48401 - protein, 15 aa, Artificial Sequence
  Peptide Derived from Human Papillomavirus
SGGFEITSSSTTTPA

SEQ ID NO: 48402 - protein, 15 aa, Artificial Sequence
  Peptide Derived from Human Papillomavirus
SGNILISTPTSGIHS

SEQ ID NO: 48403 - protein, 15 aa, Artificial Sequence
  Peptide Derived from Human Papillomavirus
SLAFSPSGVAPDPDF

SEQ ID NO: 48404 - protein, 15 aa, Artificial Sequence
  Peptide Derived from Human Papillomavirus
SQSVATPSAHLPIKP

SEQ ID NO: 48405 - protein, 15 aa, Artificial Sequence
  Peptide Derived from Human Papillomavirus
SSTVHVSSTHITNPL

SEQ ID NO: 48406 - protein, 15 aa, Artificial Sequence
  Peptide Derived from Human Papillomavirus
STIVDVTPARPPIVV

SEQ ID NO: 48407 - protein, 15 aa, Artificial Sequence
  Peptide Derived from Human Papillomavirus
TCKLSGTCPEDVVNK

SEQ ID NO: 48408 - protein, 15 aa, Artificial Sequence
  Peptide Derived from Human Papillomavirus
TEPISSTPIPGFRRI

SEQ ID NO: 48409 - protein, 15 aa, Artificial Sequence
  Peptide Derived from Human Papillomavirus
TFAVHGSGTEPISST

SEQ ID NO: 48410 - protein, 15 aa, Artificial Sequence
  Peptide Derived from Human Papillomavirus
TGEVSGNILISTPTS

SEQ ID NO: 48411 - protein, 15 aa, Artificial Sequence
  Peptide Derived from Human Papillomavirus
THDVYIQGSSFALWP

SEQ ID NO: 48412 - protein, 15 aa, Artificial Sequence
  Peptide Derived from Human Papillomavirus
TLSFASNTTNVTAPL

SEQ ID NO: 48413 - protein, 15 aa, Artificial Sequence
  Peptide Derived from Human Papillomavirus
TNPLFIDPPVIEAPQ

SEQ ID NO: 48414 - protein, 15 aa, Artificial Sequence
  Peptide Derived from Human Papillomavirus
TPAVLDITPTSSTVH

SEQ ID NO: 48415 - protein, 15 aa, Artificial Sequence
  Peptide Derived from Human Papillomavirus
TPFYSGPDIVLPTGP

SEQ ID NO: 48416 - protein, 15 aa, Artificial Sequence
  Peptide Derived from Human Papillomavirus
TQLYKTCKLSGTCPE

SEQ ID NO: 48417 - protein, 15 aa, Artificial Sequence
  Peptide Derived from Human Papillomavirus
TVHVSSTHITNPLFI

SEQ ID NO: 48418 - protein, 15 aa, Artificial Sequence
  Peptide Derived from Human Papillomavirus
TWPFVPQSPYDVTHD

SEQ ID NO: 48419 - protein, 15 aa, Artificial Sequence
  Peptide Derived from Human Papillomavirus
VESVGPTDPSIVTLV

SEQ ID NO: 48420 - protein, 15 aa, Artificial Sequence
  Peptide Derived from Human Papillomavirus
VHYYYDISPIAQAEE

SEQ ID NO: 48421 - protein, 15 aa, Artificial Sequence
  Peptide Derived from Human Papillomavirus
VLDITPTSSTVHVSS

SEQ ID NO: 48422 - protein, 15 aa, Artificial Sequence
  Peptide Derived from Human Papillomavirus
VTLVEESSVIESGAG

SEQ ID NO: 48423 - protein, 15 aa, Artificial Sequence
  Peptide Derived from Human Papillomavirus
YANIDDEAPGLSSQS

SEQ ID NO: 48424 - protein, 15 aa, Artificial Sequence
  Peptide Derived from Human Papillomavirus
YVPLGSRPSTIVDVT

SEQ ID NO: 48425 - protein, 9 aa, Artificial Sequence
  Peptide Derived from Human Papillomavirus
LYWYKTGIS

SEQ ID NO: 48426 - protein, 9 aa, Artificial Sequence
  Peptide Derived from Human Papillomavirus
WGMVVLLLV

SEQ ID NO: 48427 - protein, 9 aa, Artificial Sequence
  Peptide Derived from Human Papillomavirus
LTPSIADSI

SEQ ID NO: 48428 - protein, 9 aa, Artificial Sequence
  Peptide Derived from Human Papillomavirus
VKDCATMCR

SEQ ID NO: 48429 - protein, 9 aa, Artificial Sequence
  Peptide Derived from Human Papillomavirus
WYKTGISNI

SEQ ID NO: 48430 - protein, 9 aa, Artificial Sequence
  Peptide Derived from Human Papillomavirus
FLKSNSQAK

SEQ ID NO: 48431 - protein, 9 aa, Artificial Sequence
  Peptide Derived from Human Papillomavirus
LHIQSLACS

SEQ ID NO: 48432 - protein, 9 aa, Artificial Sequence
  Peptide Derived from Human Papillomavirus
IEPPKLRST

SEQ ID NO: 48433 - protein, 9 aa, Artificial Sequence
  Peptide Derived from Human Papillomavirus
WFYVEAVVE

SEQ ID NO: 48434 - protein, 9 aa, Artificial Sequence
  Peptide Derived from Human Papillomavirus
YIDDNLRNA

SEQ ID NO: 48435 - protein, 9 aa, Artificial Sequence
  Peptide Derived from Human Papillomavirus
FELSQMVQW

SEQ ID NO: 48436 - protein, 9 aa, Artificial Sequence
  Peptide Derived from Human Papillomavirus
LVSMDVKHR

SEQ ID NO: 48437 - protein, 9 aa, Artificial Sequence
  Peptide Derived from Human Papillomavirus
WKSFFSRTW

SEQ ID NO: 48438 - protein, 9 aa, Artificial Sequence
  Peptide Derived from Human Papillomavirus
IAYKYAQLA

SEQ ID NO: 48439 - protein, 9 aa, Artificial Sequence
  Peptide Derived from Human Papillomavirus
YGNTEVETQ

SEQ ID NO: 48440 - protein, 9 aa, Artificial Sequence
  Peptide Derived from Human Papillomavirus
IAAFGLTPS

SEQ ID NO: 48441 - protein, 9 aa, Artificial Sequence
  Peptide Derived from Human Papillomavirus
YKYAQLADT

SEQ ID NO: 48442 - protein, 9 aa, Artificial Sequence
  Peptide Derived from Human Papillomavirus
LSKLLCVSP

SEQ ID NO: 48443 - protein, 9 aa, Artificial Sequence
  Peptide Derived from Human Papillomavirus
VSGQNTNTL

SEQ ID NO: 48444 - protein, 9 aa, Artificial Sequence
  Peptide Derived from Human Papillomavirus
LPTFKCVSG

SEQ ID NO: 48445 - protein, 9 aa, Artificial Sequence
  Peptide Derived from Human Papillomavirus
LVDFIVNDN

SEQ ID NO: 48446 - protein, 9 aa, Artificial Sequence
  Peptide Derived from Human Papillomavirus
VSERHTICQ

SEQ ID NO: 48447 - protein, 9 aa, Artificial Sequence
  Peptide Derived from Human Papillomavirus
WKQIVMFLR

SEQ ID NO: 48448 - protein, 9 aa, Artificial Sequence
  Peptide Derived from Human Papillomavirus
LFGMSLMKF

SEQ ID NO: 48449 - protein, 9 aa, Artificial Sequence
  Peptide Derived from Human Papillomavirus
ICFVNSKSH

SEQ ID NO: 48450 - protein, 9 aa, Artificial Sequence
  Peptide Derived from Human Papillomavirus
FMSFLTALK

SEQ ID NO: 48451 - protein, 9 aa, Artificial Sequence
  Peptide Derived from Human Papillomavirus
YVEAVVEKK

SEQ ID NO: 48452 - protein, 9 aa, Artificial Sequence
  Peptide Derived from Human Papillomavirus
FTAQEAKQH

SEQ ID NO: 48453 - protein, 9 aa, Artificial Sequence
  Peptide Derived from Human Papillomavirus
LVQLKCPPL

SEQ ID NO: 48454 - protein, 9 aa, Artificial Sequence
  Peptide Derived from Human Papillomavirus
FGLTPSIAD

SEQ ID NO: 48455 - protein, 9 aa, Artificial Sequence
  Peptide Derived from Human Papillomavirus
LLSKLLCVS

SEQ ID NO: 48456 - protein, 9 aa, Artificial Sequence
  Peptide Derived from Human Papillomavirus
LDDATVPCW

SEQ ID NO: 48457 - protein, 9 aa, Artificial Sequence
  Peptide Derived from Human Papillomavirus
LLQQYCLYL

SEQ ID NO: 48458 - protein, 9 aa, Artificial Sequence
  Peptide Derived from Human Papillomavirus
YGAANTGKS

SEQ ID NO: 48459 - protein, 9 aa, Artificial Sequence
  Peptide Derived from Human Papillomavirus
VYGDTPEWI

SEQ ID NO: 48460 - protein, 9 aa, Artificial Sequence
  Peptide Derived from Human Papillomavirus
YGVSFSELV

SEQ ID NO: 48461 - protein, 9 aa, Artificial Sequence
  Peptide Derived from Human Papillomavirus
MLDDATVPC

SEQ ID NO: 48462 - protein, 9 aa, Artificial Sequence
  Peptide Derived from Human Papillomavirus
ILLYGAANT

SEQ ID NO: 48463 - protein, 9 aa, Artificial Sequence
  Peptide Derived from Human Papillomavirus
YLVSPLSDI

SEQ ID NO: 48464 - protein, 9 aa, Artificial Sequence
  Peptide Derived from Human Papillomavirus
FSRTWSRLS

SEQ ID NO: 48465 - protein, 9 aa, Artificial Sequence
  Peptide Derived from Human Papillomavirus
FWLQPLADA

SEQ ID NO: 48466 - protein, 9 aa, Artificial Sequence
  Peptide Derived from Human Papillomavirus
FGMSLMKFL

SEQ ID NO: 48467 - protein, 9 aa, Artificial Sequence
  Peptide Derived from Human Papillomavirus
LQQYCLYLH

SEQ ID NO: 48468 - protein, 9 aa, Artificial Sequence
  Peptide Derived from Human Papillomavirus
FLQGIPKKN

SEQ ID NO: 48469 - protein, 9 aa, Artificial Sequence
  Peptide Derived from Human Papillomavirus
VSPMCMMIE

SEQ ID NO: 48470 - protein, 9 aa, Artificial Sequence
  Peptide Derived from Human Papillomavirus
FLQGSVICF

SEQ ID NO: 48471 - protein, 9 aa, Artificial Sequence
  Peptide Derived from Human Papillomavirus
LKTSNAKAA

SEQ ID NO: 48472 - protein, 9 aa, Artificial Sequence
  Peptide Derived from Human Papillomavirus
IPKKNCILL

SEQ ID NO: 48473 - protein, 9 aa, Artificial Sequence
  Peptide Derived from Human Papillomavirus
LADAKIGML

SEQ ID NO: 48474 - protein, 9 aa, Artificial Sequence
  Peptide Derived from Human Papillomavirus
LLCVSPMCM

SEQ ID NO: 48475 - protein, 9 aa, Artificial Sequence
  Peptide Derived from Human Papillomavirus
LKCPPLLIT

SEQ ID NO: 48476 - protein, 9 aa, Artificial Sequence
  Peptide Derived from Human Papillomavirus
VSFSELVRP

SEQ ID NO: 48477 - protein, 9 aa, Artificial Sequence
  Peptide Derived from Human Papillomavirus
YKTGISNIS

SEQ ID NO: 48478 - protein, 9 aa, Artificial Sequence
  Peptide Derived from Human Papillomavirus
LQGSVICFV

SEQ ID NO: 48479 - protein, 9 aa, Artificial Sequence
  Peptide Derived from Human Papillomavirus
WIKYRCDRV

SEQ ID NO: 48480 - protein, 9 aa, Artificial Sequence
  Peptide Derived from Human Papillomavirus
LLYGAANTG

SEQ ID NO: 48481 - protein, 9 aa, Artificial Sequence
  Peptide Derived from Human Papillomavirus
VDDSEIAYK

SEQ ID NO: 48482 - protein, 9 aa, Artificial Sequence
  Peptide Derived from Human Papillomavirus
LTQAETETA

SEQ ID NO: 48483 - protein, 9 aa, Artificial Sequence
  Peptide Derived from Human Papillomavirus
FYVEAVVEK

SEQ ID NO: 48484 - protein, 9 aa, Artificial Sequence
  Peptide Derived from Human Papillomavirus
VVFTFPNEF

SEQ ID NO: 48485 - protein, 9 aa, Artificial Sequence
  Peptide Derived from Human Papillomavirus
VETQQMLQV

SEQ ID NO: 48486 - protein, 9 aa, Artificial Sequence
  Peptide Derived from Human Papillomavirus
IQRQTVLQH

SEQ ID NO: 48487 - protein, 9 aa, Artificial Sequence
  Peptide Derived from Human Papillomavirus
MMIEPPKLR

SEQ ID NO: 48488 - protein, 9 aa, Artificial Sequence
  Peptide Derived from Human Papillomavirus
LRSTAAALY

SEQ ID NO: 48489 - protein, 9 aa, Artificial Sequence
  Peptide Derived from Human Papillomavirus
LITSNINAG

SEQ ID NO: 48490 - protein, 9 aa, Artificial Sequence
  Peptide Derived from Human Papillomavirus
IVKDCATMC

SEQ ID NO: 48491 - protein, 9 aa, Artificial Sequence
  Peptide Derived from Human Papillomavirus
YDNDIVDDS

SEQ ID NO: 48492 - protein, 9 aa, Artificial Sequence
  Peptide Derived from Human Papillomavirus
IEKLLSKLL

SEQ ID NO: 48493 - protein, 9 aa, Artificial Sequence
  Peptide Derived from Human Papillomavirus
ICQTPLTNI

SEQ ID NO: 48494 - protein, 9 aa, Artificial Sequence
  Peptide Derived from Human Papillomavirus
LVSPLSDIS

SEQ ID NO: 48495 - protein, 9 aa, Artificial Sequence
  Peptide Derived from Human Papillomavirus
LDGNLVSMD

SEQ ID NO: 48496 - protein, 9 aa, Artificial Sequence
  Peptide Derived from Human Papillomavirus
VQLKCPPLL

SEQ ID NO: 48497 - protein, 9 aa, Artificial Sequence
  Peptide Derived from Human Papillomavirus
FESEDSGYG

SEQ ID NO: 48498 - protein, 9 aa, Artificial Sequence
  Peptide Derived from Human Papillomavirus
YLHNRLVVF

SEQ ID NO: 48499 - protein, 9 aa, Artificial Sequence
  Peptide Derived from Human Papillomavirus
VRPFKSNKS

SEQ ID NO: 48500 - protein, 9 aa, Artificial Sequence
  Peptide Derived from Human Papillomavirus
VDNNISPRL

SEQ ID NO: 48501 - protein, 9 aa, Artificial Sequence
  Peptide Derived from Human Papillomavirus
WLQPLADAK

SEQ ID NO: 48502 - protein, 9 aa, Artificial Sequence
  Peptide Derived from Human Papillomavirus
LCVSPMCMM

SEQ ID NO: 48503 - protein, 9 aa, Artificial Sequence
  Peptide Derived from Human Papillomavirus
VKHRPLVQL

SEQ ID NO: 48504 - protein, 9 aa, Artificial Sequence
  Peptide Derived from Human Papillomavirus
LKAICIEKQ

SEQ ID NO: 48505 - protein, 9 aa, Artificial Sequence
  Peptide Derived from Human Papillomavirus
WSRLSLHED

SEQ ID NO: 48506 - protein, 9 aa, Artificial Sequence
  Peptide Derived from Human Papillomavirus
MVVLLLVRY

SEQ ID NO: 48507 - protein, 9 aa, Artificial Sequence
  Peptide Derived from Human Papillomavirus
LNVLKTSNA

SEQ ID NO: 48508 - protein, 9 aa, Artificial Sequence
  Peptide Derived from Human Papillomavirus
WIQRQTVLQ

SEQ ID NO: 48509 - protein, 9 aa, Artificial Sequence
  Peptide Derived from Human Papillomavirus
VVEKKTGDA

SEQ ID NO: 48510 - protein, 9 aa, Artificial Sequence
  Peptide Derived from Human Papillomavirus
MSFLTALKR

SEQ ID NO: 48511 - protein, 9 aa, Artificial Sequence
  Peptide Derived from Human Papillomavirus
FPNEFPFDE

SEQ ID NO: 48512 - protein, 9 aa, Artificial Sequence
  Peptide Derived from Human Papillomavirus
FVNSKSHFW

SEQ ID NO: 48513 - protein, 9 aa, Artificial Sequence
  Peptide Derived from Human Papillomavirus
LVRYKCGKN

SEQ ID NO: 48514 - protein, 9 aa, Artificial Sequence
  Peptide Derived from Human Papillomavirus
LRYQGVEFM

SEQ ID NO: 48515 - protein, 9 aa, Artificial Sequence
  Peptide Derived from Human Papillomavirus
LKRKYLVSP

SEQ ID NO: 48516 - protein, 9 aa, Artificial Sequence
  Peptide Derived from Human Papillomavirus
FKSNKSTCC

SEQ ID NO: 48517 - protein, 9 aa, Artificial Sequence
  Peptide Derived from Human Papillomavirus
VVLLLVRYK

SEQ ID NO: 48518 - protein, 9 aa, Artificial Sequence
  Peptide Derived from Human Papillomavirus
YRCDRVDDG

SEQ ID NO: 48519 - protein, 9 aa, Artificial Sequence
  Peptide Derived from Human Papillomavirus
LHNRLVVFT

SEQ ID NO: 48520 - protein, 9 aa, Artificial Sequence
  Peptide Derived from Human Papillomavirus
LADTNSNAS

SEQ ID NO: 48521 - protein, 9 aa, Artificial Sequence
  Peptide Derived from Human Papillomavirus
YLHIQSLAC

SEQ ID NO: 48522 - protein, 9 aa, Artificial Sequence
  Peptide Derived from Human Papillomavirus
IQSLACSWG

SEQ ID NO: 48523 - protein, 9 aa, Artificial Sequence
  Peptide Derived from Human Papillomavirus
YSKNKVWEV

SEQ ID NO: 48524 - protein, 9 aa, Artificial Sequence
  Peptide Derived from Human Papillomavirus
YKAREMGFK

SEQ ID NO: 48525 - protein, 9 aa, Artificial Sequence
  Peptide Derived from Human Papillomavirus
LTAFNSSHK

SEQ ID NO: 48526 - protein, 9 aa, Artificial Sequence
  Peptide Derived from Human Papillomavirus
MGFKHINHQ

SEQ ID NO: 48527 - protein, 9 aa, Artificial Sequence
  Peptide Derived from Human Papillomavirus
LGTEETQTT

SEQ ID NO: 48528 - protein, 9 aa, Artificial Sequence
  Peptide Derived from Human Papillomavirus
YTAVSSTWH

SEQ ID NO: 48529 - protein, 9 aa, Artificial Sequence
  Peptide Derived from Human Papillomavirus
LSQVKIPKT

SEQ ID NO: 48530 - protein, 9 aa, Artificial Sequence
  Peptide Derived from Human Papillomavirus
LEVYLTAPT

SEQ ID NO: 48531 - protein, 9 aa, Artificial Sequence
  Peptide Derived from Human Papillomavirus
VDYYGLYYV

SEQ ID NO: 48532 - protein, 9 aa, Artificial Sequence
  Peptide Derived from Human Papillomavirus
LTLETIYNS

SEQ ID NO: 48533 - protein, 9 aa, Artificial Sequence
  Peptide Derived from Human Papillomavirus
YNSQYSNEK

SEQ ID NO: 48534 - protein, 9 aa, Artificial Sequence
  Peptide Derived from Human Papillomavirus
FDGDICNTM

SEQ ID NO: 48535 - protein, 9 aa, Artificial Sequence
  Peptide Derived from Human Papillomavirus
INHQVVPTL

SEQ ID NO: 48536 - protein, 9 aa, Artificial Sequence
  Peptide Derived from Human Papillomavirus
VILCPTSVF

SEQ ID NO: 48537 - protein, 9 aa, Artificial Sequence
  Peptide Derived from Human Papillomavirus
VKHKSAIVT

SEQ ID NO: 48538 - protein, 9 aa, Artificial Sequence
  Peptide Derived from Human Papillomavirus
YVHEGIRTY

SEQ ID NO: 48539 - protein, 9 aa, Artificial Sequence
  Peptide Derived from Human Papillomavirus
ILCPTSVFS

SEQ ID NO: 48540 - protein, 9 aa, Artificial Sequence
  Peptide Derived from Human Papillomavirus
LYTAVSSTW

SEQ ID NO: 48541 - protein, 9 aa, Artificial Sequence
  Peptide Derived from Human Papillomavirus
IRTYFVQFK

SEQ ID NO: 48542 - protein, 9 aa, Artificial Sequence
  Peptide Derived from Human Papillomavirus
ICEEASVTV

SEQ ID NO: 48543 - protein, 9 aa, Artificial Sequence
  Peptide Derived from Human Papillomavirus
VPTLAVSKN

SEQ ID NO: 48544 - protein, 9 aa, Artificial Sequence
  Peptide Derived from Human Papillomavirus
WKHMRLECA

SEQ ID NO: 48545 - protein, 9 aa, Artificial Sequence
  Peptide Derived from Human Papillomavirus
VWEVHAGGQ

SEQ ID NO: 48546 - protein, 9 aa, Artificial Sequence
  Peptide Derived from Human Papillomavirus
LQDVSLEVY

SEQ ID NO: 48547 - protein, 9 aa, Artificial Sequence
  Peptide Derived from Human Papillomavirus
YLTAPTGCI

SEQ ID NO: 48548 - protein, 9 aa, Artificial Sequence
  Peptide Derived from Human Papillomavirus
IELQLTLET

SEQ ID NO: 48549 - protein, 9 aa, Artificial Sequence
  Peptide Derived from Human Papillomavirus
VKIPKTITV

SEQ ID NO: 48550 - protein, 9 aa, Artificial Sequence
  Peptide Derived from Human Papillomavirus
YENDSTDLR

SEQ ID NO: 48551 - protein, 9 aa, Artificial Sequence
  Peptide Derived from Human Papillomavirus
WTLQDVSLE

SEQ ID NO: 48552 - protein, 9 aa, Artificial Sequence
  Peptide Derived from Human Papillomavirus
VVPTLAVSK

SEQ ID NO: 48553 - protein, 9 aa, Artificial Sequence
  Peptide Derived from Human Papillomavirus
LQAIELQLT

SEQ ID NO: 48554 - protein, 9 aa, Artificial Sequence
  Peptide Derived from Human Papillomavirus
IRQHLANHP

SEQ ID NO: 48555 - protein, 9 aa, Artificial Sequence
  Peptide Derived from Human Papillomavirus
IQRPRSEPD

SEQ ID NO: 48556 - protein, 9 aa, Artificial Sequence
  Peptide Derived from Human Papillomavirus
LCPTSVFSS

SEQ ID NO: 48557 - protein, 9 aa, Artificial Sequence
  Peptide Derived from Human Papillomavirus
IPKTITVST

SEQ ID NO: 48558 - protein, 9 aa, Artificial Sequence
  Peptide Derived from Human Papillomavirus
VDSAPILTA

SEQ ID NO: 48559 - protein, 9 aa, Artificial Sequence
  Peptide Derived from Human Papillomavirus
VCQDKILTH

SEQ ID NO: 48560 - protein, 9 aa, Artificial Sequence
  Peptide Derived from Human Papillomavirus
LANHPAATH

SEQ ID NO: 48561 - protein, 9 aa, Artificial Sequence
  Peptide Derived from Human Papillomavirus
FKKHCTLYT

SEQ ID NO: 48562 - protein, 9 aa, Artificial Sequence
  Peptide Derived from Human Papillomavirus
VYLTAPTGC

SEQ ID NO: 48563 - protein, 9 aa, Artificial Sequence
  Peptide Derived from Human Papillomavirus
VSSPEIIRQ

SEQ ID NO: 48564 - protein, 9 aa, Artificial Sequence
  Peptide Derived from Human Papillomavirus
IIRQHLANH

SEQ ID NO: 48565 - protein, 9 aa, Artificial Sequence
  Peptide Derived from Human Papillomavirus
VVEGQVDYY

SEQ ID NO: 48566 - protein, 9 aa, Artificial Sequence
  Peptide Derived from Human Papillomavirus
YICEEASVT

SEQ ID NO: 48567 - protein, 9 aa, Artificial Sequence
  Peptide Derived from Human Papillomavirus
LHRDSVDSA

SEQ ID NO: 48568 - protein, 9 aa, Artificial Sequence
  Peptide Derived from Human Papillomavirus
VSKNKALQA

SEQ ID NO: 48569 - protein, 9 aa, Artificial Sequence
  Peptide Derived from Human Papillomavirus
FSSNEVSSP

SEQ ID NO: 48570 - protein, 9 aa, Artificial Sequence
  Peptide Derived from Human Papillomavirus
LLHRDSVDS

SEQ ID NO: 48571 - protein, 9 aa, Artificial Sequence
  Peptide Derived from Human Papillomavirus
WTGHNVKHK

SEQ ID NO: 48572 - protein, 9 aa, Artificial Sequence
  Peptide Derived from Human Papillomavirus
YGLYYVHEG

SEQ ID NO: 48573 - protein, 9 aa, Artificial Sequence
  Peptide Derived from Human Papillomavirus
MRLECAIYY

SEQ ID NO: 48574 - protein, 9 aa, Artificial Sequence
  Peptide Derived from Human Papillomavirus
WTHIYICEE

SEQ ID NO: 48575 - protein, 9 aa, Artificial Sequence
  Peptide Derived from Human Papillomavirus
MTNLDTAST

SEQ ID NO: 48576 - protein, 9 aa, Artificial Sequence
  Peptide Derived from Human Papillomavirus
LLCFCVLLC

SEQ ID NO: 48577 - protein, 9 aa, Artificial Sequence
  Peptide Derived from Human Papillomavirus
FRCFIVYII

SEQ ID NO: 48578 - protein, 9 aa, Artificial Sequence
  Peptide Derived from Human Papillomavirus
VLLCVCLLI

SEQ ID NO: 48579 - protein, 9 aa, Artificial Sequence
  Peptide Derived from Human Papillomavirus
VYIIFVYIP

SEQ ID NO: 48580 - protein, 9 aa, Artificial Sequence
  Peptide Derived from Human Papillomavirus
LCFCVLLCV

SEQ ID NO: 48581 - protein, 9 aa, Artificial Sequence
  Peptide Derived from Human Papillomavirus
IRPLLLSVS

SEQ ID NO: 48582 - protein, 9 aa, Artificial Sequence
  Peptide Derived from Human Papillomavirus
LLIRPLLLS

SEQ ID NO: 48583 - protein, 9 aa, Artificial Sequence
  Peptide Derived from Human Papillomavirus
LCVCLLIRP

SEQ ID NO: 48584 - protein, 9 aa, Artificial Sequence
  Peptide Derived from Human Papillomavirus
LLCVCLLIR

SEQ ID NO: 48585 - protein, 9 aa, Artificial Sequence
  Peptide Derived from Human Papillomavirus
FIVYIIFVY

SEQ ID NO: 48586 - protein, 9 aa, Artificial Sequence
  Peptide Derived from Human Papillomavirus
IPLFLIHTH

SEQ ID NO: 48587 - protein, 9 aa, Artificial Sequence
  Peptide Derived from Human Papillomavirus
YIPLFLIHT

SEQ ID NO: 48588 - protein, 9 aa, Artificial Sequence
  Peptide Derived from Human Papillomavirus
VLLLWITAA

SEQ ID NO: 48589 - protein, 9 aa, Artificial Sequence
  Peptide Derived from Human Papillomavirus
LLLWITAAS

SEQ ID NO: 48590 - protein, 9 aa, Artificial Sequence
  Peptide Derived from Human Papillomavirus
LLLSVSTYT

SEQ ID NO: 48591 - protein, 9 aa, Artificial Sequence
  Peptide Derived from Human Papillomavirus
IIFVYIPLF

SEQ ID NO: 48592 - protein, 9 aa, Artificial Sequence
  Peptide Derived from Human Papillomavirus
FLLCFCVLL

SEQ ID NO: 48593 - protein, 9 aa, Artificial Sequence
  Peptide Derived from Human Papillomavirus
FCVLLCVCL

SEQ ID NO: 48594 - protein, 9 aa, Artificial Sequence
  Peptide Derived from Human Papillomavirus
WITAASAFR

SEQ ID NO: 48595 - protein, 9 aa, Artificial Sequence
  Peptide Derived from Human Papillomavirus
VSTYTSLII

SEQ ID NO: 48596 - protein, 9 aa, Artificial Sequence
  Peptide Derived from Human Papillomavirus
ITAASAFRC

SEQ ID NO: 48597 - protein, 9 aa, Artificial Sequence
  Peptide Derived from Human Papillomavirus
LLWITAASA

SEQ ID NO: 48598 - protein, 9 aa, Artificial Sequence
  Peptide Derived from Human Papillomavirus
LDTASTTLL

SEQ ID NO: 48599 - protein, 9 aa, Artificial Sequence
  Peptide Derived from Human Papillomavirus
LIHTHARFL

SEQ ID NO: 48600 - protein, 9 aa, Artificial Sequence
  Peptide Derived from Human Papillomavirus
LLSVSTYTS

SEQ ID NO: 48601 - protein, 9 aa, Artificial Sequence
  Peptide Derived from Human Papillomavirus
ILVLLLWIT

SEQ ID NO: 48602 - protein, 9 aa, Artificial Sequence
  Peptide Derived from Human Papillomavirus
LLACFLLCF

SEQ ID NO: 48603 - protein, 9 aa, Artificial Sequence
  Peptide Derived from Human Papillomavirus
IILVLLLWI

SEQ ID NO: 48604 - protein, 9 aa, Artificial Sequence
  Peptide Derived from Human Papillomavirus
LACFLLCFC

SEQ ID NO: 48605 - protein, 9 aa, Artificial Sequence
  Peptide Derived from Human Papillomavirus
LIRPLLLSV

SEQ ID NO: 48606 - protein, 9 aa, Artificial Sequence
  Peptide Derived from Human Papillomavirus
LWITAASAF

SEQ ID NO: 48607 - protein, 9 aa, Artificial Sequence
  Peptide Derived from Human Papillomavirus
YTSLIILVL

SEQ ID NO: 48608 - protein, 9 aa, Artificial Sequence
  Peptide Derived from Human Papillomavirus
IFVYIPLFL

SEQ ID NO: 48609 - protein, 9 aa, Artificial Sequence
  Peptide Derived from Human Papillomavirus
FVYIPLFLI

SEQ ID NO: 48610 - protein, 9 aa, Artificial Sequence
  Peptide Derived from Human Papillomavirus
LFLIHTHAR

SEQ ID NO: 48611 - protein, 9 aa, Artificial Sequence
  Peptide Derived from Human Papillomavirus
LIILVLLLW

SEQ ID NO: 48612 - protein, 9 aa, Artificial Sequence
  Peptide Derived from Human Papillomavirus
MHQKRTAMF

SEQ ID NO: 48613 - protein, 9 aa, Artificial Sequence
  Peptide Derived from Human Papillomavirus
YRDGNPYAV

SEQ ID NO: 48614 - protein, 9 aa, Artificial Sequence
  Peptide Derived from Human Papillomavirus
FYSKISEYR

SEQ ID NO: 48615 - protein, 9 aa, Artificial Sequence
  Peptide Derived from Human Papillomavirus
LYGTTLEQQ

SEQ ID NO: 48616 - protein, 9 aa, Artificial Sequence
  Peptide Derived from Human Papillomavirus
FRDLCIVYR

SEQ ID NO: 48617 - protein, 9 aa, Artificial Sequence
  Peptide Derived from Human Papillomavirus
LECVYCKQQ

SEQ ID NO: 48618 - protein, 9 aa, Artificial Sequence
  Peptide Derived from Human Papillomavirus
IRCINCQKP

SEQ ID NO: 48619 - protein, 9 aa, Artificial Sequence
  Peptide Derived from Human Papillomavirus
YCKQQLLRR

SEQ ID NO: 48620 - protein, 9 aa, Artificial Sequence
  Peptide Derived from Human Papillomavirus
YNKPLCDLL

SEQ ID NO: 48621 - protein, 9 aa, Artificial Sequence
  Peptide Derived from Human Papillomavirus
IRGRWTGRC

SEQ ID NO: 48622 - protein, 9 aa, Artificial Sequence
  Peptide Derived from Human Papillomavirus
MSCCRSSRT

SEQ ID NO: 48623 - protein, 9 aa, Artificial Sequence
  Peptide Derived from Human Papillomavirus
YSLYGTTLE

SEQ ID NO: 48624 - protein, 9 aa, Artificial Sequence
  Peptide Derived from Human Papillomavirus
IILECVYCK

SEQ ID NO: 48625 - protein, 9 aa, Artificial Sequence
  Peptide Derived from Human Papillomavirus
INCQKPLCP

SEQ ID NO: 48626 - protein, 9 aa, Artificial Sequence
  Peptide Derived from Human Papillomavirus
LLRREVYDF

SEQ ID NO: 48627 - protein, 9 aa, Artificial Sequence
  Peptide Derived from Human Papillomavirus
LLIRCINCQ

SEQ ID NO: 48628 - protein, 9 aa, Artificial Sequence
  Peptide Derived from Human Papillomavirus
LCDLLIRCI

SEQ ID NO: 48629 - protein, 9 aa, Artificial Sequence
  Peptide Derived from Human Papillomavirus
LPQLCTELQ

SEQ ID NO: 48630 - protein, 9 aa, Artificial Sequence
  Peptide Derived from Human Papillomavirus
VCDKCLKFY

SEQ ID NO: 48631 - protein, 9 aa, Artificial Sequence
  Peptide Derived from Human Papillomavirus
IHDIILECV

SEQ ID NO: 48632 - protein, 9 aa, Artificial Sequence
  Peptide Derived from Human Papillomavirus
WTGRCMSCC

SEQ ID NO: 48633 - protein, 9 aa, Artificial Sequence
  Peptide Derived from Human Papillomavirus
FAFRDLCIV

SEQ ID NO: 48634 - protein, 9 aa, Artificial Sequence
  Peptide Derived from Human Papillomavirus
MHGDTPTLH

SEQ ID NO: 48635 - protein, 9 aa, Artificial Sequence
  Peptide Derived from Human Papillomavirus
MGTLGIVCP

SEQ ID NO: 48636 - protein, 9 aa, Artificial Sequence
  Peptide Derived from Human Papillomavirus
MLDLQPETT

SEQ ID NO: 48637 - protein, 9 aa, Artificial Sequence
  Peptide Derived from Human Papillomavirus
IVTFCCKCD

SEQ ID NO: 48638 - protein, 9 aa, Artificial Sequence
  Peptide Derived from Human Papillomavirus
LEDLLMGTL

SEQ ID NO: 48639 - protein, 9 aa, Artificial Sequence
  Peptide Derived from Human Papillomavirus
LLMGTLGIV

SEQ ID NO: 48640 - protein, 9 aa, Artificial Sequence
  Peptide Derived from Human Papillomavirus
VCPICSQKP

SEQ ID NO: 48641 - protein, 9 aa, Artificial Sequence
  Peptide Derived from Human Papillomavirus
LGIVCPICS

SEQ ID NO: 48642 - protein, 9 aa, Artificial Sequence
  Peptide Derived from Human Papillomavirus
LQPETTDLY

SEQ ID NO: 48643 - protein, 9 aa, Artificial Sequence
  Peptide Derived from Human Papillomavirus
VQSTHVDIR

SEQ ID NO: 48644 - protein, 9 aa, Artificial Sequence
  Peptide Derived from Human Papillomavirus
VDIRTLEDL

SEQ ID NO: 48645 - protein, 9 aa, Artificial Sequence
  Peptide Derived from Human Papillomavirus
YCYEQLNDS

SEQ ID NO: 48646 - protein, 9 aa, Artificial Sequence
  Peptide Derived from Human Papillomavirus
IVCPICSQK

SEQ ID NO: 48647 - protein, 9 aa, Artificial Sequence
  Peptide Derived from Human Papillomavirus
LCVQSTHVD

SEQ ID NO: 48648 - protein, 9 aa, Artificial Sequence
  Peptide Derived from Human Papillomavirus
LHEYMLDLQ

SEQ ID NO: 48649 - protein, 9 aa, Artificial Sequence
  Peptide Derived from Human Papillomavirus
MQVTFIYIL

SEQ ID NO: 48650 - protein, 9 aa, Artificial Sequence
  Peptide Derived from Human Papillomavirus
VTFIYILVI

SEQ ID NO: 48651 - protein, 9 aa, Artificial Sequence
  Peptide Derived from Human Papillomavirus
MTYIHSMNS

SEQ ID NO: 48652 - protein, 9 aa, Artificial Sequence
  Peptide Derived from Human Papillomavirus
VGENVPDDL

SEQ ID NO: 48653 - protein, 9 aa, Artificial Sequence
  Peptide Derived from Human Papillomavirus
FTTLQANKS

SEQ ID NO: 48654 - protein, 9 aa, Artificial Sequence
  Peptide Derived from Human Papillomavirus
YLPPVPVSK

SEQ ID NO: 48655 - protein, 9 aa, Artificial Sequence
  Peptide Derived from Human Papillomavirus
ISTSETTYK

SEQ ID NO: 48656 - protein, 9 aa, Artificial Sequence
  Peptide Derived from Human Papillomavirus
MDYKQTQLC

SEQ ID NO: 48657 - protein, 9 aa, Artificial Sequence
  Peptide Derived from Human Papillomavirus
LELINTVIQ

SEQ ID NO: 48658 - protein, 9 aa, Artificial Sequence
  Peptide Derived from Human Papillomavirus
VARTNIYYH

SEQ ID NO: 48659 - protein, 9 aa, Artificial Sequence
  Peptide Derived from Human Papillomavirus
FIFQLCKIT

SEQ ID NO: 48660 - protein, 9 aa, Artificial Sequence
  Peptide Derived from Human Papillomavirus
IKGSGSTAN

SEQ ID NO: 48661 - protein, 9 aa, Artificial Sequence
  Peptide Derived from Human Papillomavirus
FYNPDTQRL

SEQ ID NO: 48662 - protein, 9 aa, Artificial Sequence
  Peptide Derived from Human Papillomavirus
FGLQPPPGG

SEQ ID NO: 48663 - protein, 9 aa, Artificial Sequence
  Peptide Derived from Human Papillomavirus
VYLPPVPVS

SEQ ID NO: 48664 - protein, 9 aa, Artificial Sequence
  Peptide Derived from Human Papillomavirus
YRFVTSQAI

SEQ ID NO: 48665 - protein, 9 aa, Artificial Sequence
  Peptide Derived from Human Papillomavirus
VNVYHIFFQ

SEQ ID NO: 48666 - protein, 9 aa, Artificial Sequence
  Peptide Derived from Human Papillomavirus
LKEKFSADL

SEQ ID NO: 48667 - protein, 9 aa, Artificial Sequence
  Peptide Derived from Human Papillomavirus
LDICTSICK

SEQ ID NO: 48668 - protein, 9 aa, Artificial Sequence
  Peptide Derived from Human Papillomavirus
MSLWLPSEA

SEQ ID NO: 48669 - protein, 9 aa, Artificial Sequence
  Peptide Derived from Human Papillomavirus
LRREQMFVR

SEQ ID NO: 48670 - protein, 9 aa, Artificial Sequence
  Peptide Derived from Human Papillomavirus
MDFTTLQAN

SEQ ID NO: 48671 - protein, 9 aa, Artificial Sequence
  Peptide Derived from Human Papillomavirus
ILVITCYEN

SEQ ID NO: 48672 - protein, 9 aa, Artificial Sequence
  Peptide Derived from Human Papillomavirus
LQANKSEVP

SEQ ID NO: 48673 - protein, 9 aa, Artificial Sequence
  Peptide Derived from Human Papillomavirus
YDLQFIFQL

SEQ ID NO: 48674 - protein, 9 aa, Artificial Sequence
  Peptide Derived from Human Papillomavirus
WGKGSPCTN

SEQ ID NO: 48675 - protein, 9 aa, Artificial Sequence
  Peptide Derived from Human Papillomavirus
YRVFRIHLP

SEQ ID NO: 48676 - protein, 9 aa, Artificial Sequence
  Peptide Derived from Human Papillomavirus
LFVTVVDTT

SEQ ID NO: 48677 - protein, 9 aa, Artificial Sequence
  Peptide Derived from Human Papillomavirus
LGVGISGHP

SEQ ID NO: 48678 - protein, 9 aa, Artificial Sequence
  Peptide Derived from Human Papillomavirus
VGRGQPLGV

SEQ ID NO: 48679 - protein, 9 aa, Artificial Sequence
  Peptide Derived from Human Papillomavirus
ISGHPLLNK

SEQ ID NO: 48680 - protein, 9 aa, Artificial Sequence
  Peptide Derived from Human Papillomavirus
FPIKKPNNN

SEQ ID NO: 48681 - protein, 9 aa, Artificial Sequence
  Peptide Derived from Human Papillomavirus
LCKITLTAD

SEQ ID NO: 48682 - protein, 9 aa, Artificial Sequence
  Peptide Derived from Human Papillomavirus
MNSTILEDW

SEQ ID NO: 48683 - protein, 9 aa, Artificial Sequence
  Peptide Derived from Human Papillomavirus
LGKRKATPT

SEQ ID NO: 48684 - protein, 9 aa, Artificial Sequence
  Peptide Derived from Human Papillomavirus
LTADVMTYI

SEQ ID NO: 48685 - protein, 9 aa, Artificial Sequence
  Peptide Derived from Human Papillomavirus
VPLDICTSI

SEQ ID NO: 48686 - protein, 9 aa, Artificial Sequence
  Peptide Derived from Human Papillomavirus
FWEVNLKEK

SEQ ID NO: 48687 - protein, 9 aa, Artificial Sequence
  Peptide Derived from Human Papillomavirus
IGCKPPIGE

SEQ ID NO: 48688 - protein, 9 aa, Artificial Sequence
  Peptide Derived from Human Papillomavirus
YTFWEVNLK

SEQ ID NO: 48689 - protein, 9 aa, Artificial Sequence
  Peptide Derived from Human Papillomavirus
VPVSKVVST

SEQ ID NO: 48690 - protein, 9 aa, Artificial Sequence
  Peptide Derived from Human Papillomavirus
WLPSEATVY

SEQ ID NO: 48691 - protein, 9 aa, Artificial Sequence
  Peptide Derived from Human Papillomavirus
IHSMNSTIL

SEQ ID NO: 48692 - protein, 9 aa, Artificial Sequence
  Peptide Derived from Human Papillomavirus
VDNRECISM

SEQ ID NO: 48693 - protein, 9 aa, Artificial Sequence
  Peptide Derived from Human Papillomavirus
YHAGTSRLL

SEQ ID NO: 48694 - protein, 9 aa, Artificial Sequence
  Peptide Derived from Human Papillomavirus
LVPKVSGLQ

SEQ ID NO: 48695 - protein, 9 aa, Artificial Sequence
  Peptide Derived from Human Papillomavirus
YWLQRAQGH

SEQ ID NO: 48696 - protein, 9 aa, Artificial Sequence
  Peptide Derived from Human Papillomavirus
LCAAISTSE

SEQ ID NO: 48697 - protein, 9 aa, Artificial Sequence
  Peptide Derived from Human Papillomavirus
ILVPKVSGL

SEQ ID NO: 48698 - protein, 9 aa, Artificial Sequence
  Peptide Derived from Human Papillomavirus
IQDGDMVDT

SEQ ID NO: 48699 - protein, 9 aa, Artificial Sequence
  Peptide Derived from Human Papillomavirus
VNPGDCPPL

SEQ ID NO: 48700 - protein, 9 aa, Artificial Sequence
  Peptide Derived from Human Papillomavirus
LYIKGSGST

SEQ ID NO: 48701 - protein, 9 aa, Artificial Sequence
  Peptide Derived from Human Papillomavirus
ICTSICKYP

SEQ ID NO: 48702 - protein, 9 aa, Artificial Sequence
  Peptide Derived from Human Papillomavirus
LINTVIQDG

SEQ ID NO: 48703 - protein, 9 aa, Artificial Sequence
  Peptide Derived from Human Papillomavirus
FGFPDTSFY

SEQ ID NO: 48704 - protein, 9 aa, Artificial Sequence
  Peptide Derived from Human Papillomavirus
VSKVVSTDE

SEQ ID NO: 48705 - protein, 9 aa, Artificial Sequence
  Peptide Derived from Human Papillomavirus
FQLCKITLT

SEQ ID NO: 48706 - protein, 9 aa, Artificial Sequence
  Peptide Derived from Human Papillomavirus
LGRKFLLQA

SEQ ID NO: 48707 - protein, 9 aa, Artificial Sequence
  Peptide Derived from Human Papillomavirus
LIGCKPPIG

SEQ ID NO: 48708 - protein, 9 aa, Artificial Sequence
  Peptide Derived from Human Papillomavirus
VTVVDTTRS

SEQ ID NO: 48709 - protein, 9 aa, Artificial Sequence
  Peptide Derived from Human Papillomavirus
LCLIGCKPP

SEQ ID NO: 48710 - protein, 9 aa, Artificial Sequence
  Peptide Derived from Human Papillomavirus
FIYILVITC

SEQ ID NO: 48711 - protein, 9 aa, Artificial Sequence
  Peptide Derived from Human Papillomavirus
VFRIHLPDP

SEQ ID NO: 48712 - protein, 9 aa, Artificial Sequence
  Peptide Derived from Human Papillomavirus
MFVRHLFNR

SEQ ID NO: 48713 - protein, 9 aa, Artificial Sequence
  Peptide Derived from Human Papillomavirus
FNRAGAVGE

SEQ ID NO: 48714 - protein, 9 aa, Artificial Sequence
  Peptide Derived from Human Papillomavirus
LLQAGLKAK

SEQ ID NO: 48715 - protein, 9 aa, Artificial Sequence
  Peptide Derived from Human Papillomavirus
WACVGVEVG

SEQ ID NO: 48716 - protein, 9 aa, Artificial Sequence
  Peptide Derived from Human Papillomavirus
LDQFPLGRK

SEQ ID NO: 48717 - protein, 9 aa, Artificial Sequence
  Peptide Derived from Human Papillomavirus
MVTSDAQIF

SEQ ID NO: 48718 - protein, 9 aa, Artificial Sequence
  Peptide Derived from Human Papillomavirus
LPSEATVYL

SEQ ID NO: 48719 - protein, 9 aa, Artificial Sequence
  Peptide Derived from Human Papillomavirus
YKQTQLCLI

SEQ ID NO: 48720 - protein, 9 aa, Artificial Sequence
  Peptide Derived from Human Papillomavirus
LAVGHPYFP

SEQ ID NO: 48721 - protein, 9 aa, Artificial Sequence
  Peptide Derived from Human Papillomavirus
YFPTPSGSM

SEQ ID NO: 48722 - protein, 9 aa, Artificial Sequence
  Peptide Derived from Human Papillomavirus
MSLCAAIST

SEQ ID NO: 48723 - protein, 9 aa, Artificial Sequence
  Peptide Derived from Human Papillomavirus
YILVITCYE

SEQ ID NO: 48724 - protein, 9 aa, Artificial Sequence
  Peptide Derived from Human Papillomavirus
YYHAGTSRL

SEQ ID NO: 48725 - protein, 9 aa, Artificial Sequence
  Peptide Derived from Human Papillomavirus
LVWACVGVE

SEQ ID NO: 48726 - protein, 9 aa, Artificial Sequence
  Peptide Derived from Human Papillomavirus
LPPVPVSKV

SEQ ID NO: 48727 - protein, 9 aa, Artificial Sequence
  Peptide Derived from Human Papillomavirus
FVTSQAIAC

SEQ ID NO: 48728 - protein, 9 aa, Artificial Sequence
  Peptide Derived from Human Papillomavirus
IHLPDPNKF

SEQ ID NO: 48729 - protein, 9 aa, Artificial Sequence
  Peptide Derived from Human Papillomavirus
IYILVITCY

SEQ ID NO: 48730 - protein, 9 aa, Artificial Sequence
  Peptide Derived from Human Papillomavirus
VDTTRSTNM

SEQ ID NO: 48731 - protein, 9 aa, Artificial Sequence
  Peptide Derived from Human Papillomavirus
IFFQMSLWL

SEQ ID NO: 48732 - protein, 9 aa, Artificial Sequence
  Peptide Derived from Human Papillomavirus
FFQMSLWLP

SEQ ID NO: 48733 - protein, 9 aa, Artificial Sequence
  Peptide Derived from Human Papillomavirus
YIKMVSEPY

SEQ ID NO: 48734 - protein, 9 aa, Artificial Sequence
  Peptide Derived from Human Papillomavirus
VTSQAIACQ

SEQ ID NO: 48735 - protein, 9 aa, Artificial Sequence
  Peptide Derived from Human Papillomavirus
FRIHLPDPN

SEQ ID NO: 48736 - protein, 9 aa, Artificial Sequence
  Peptide Derived from Human Papillomavirus
MRHKRSAKR

SEQ ID NO: 48737 - protein, 9 aa, Artificial Sequence
  Peptide Derived from Human Papillomavirus
FITDTSTTP

SEQ ID NO: 48738 - protein, 9 aa, Artificial Sequence
  Peptide Derived from Human Papillomavirus
ILQYGSMGV

SEQ ID NO: 48739 - protein, 9 aa, Artificial Sequence
  Peptide Derived from Human Papillomavirus
IELQTITPS

SEQ ID NO: 48740 - protein, 9 aa, Artificial Sequence
  Peptide Derived from Human Papillomavirus
FYLHPSYYM

SEQ ID NO: 48741 - protein, 9 aa, Artificial Sequence
  Peptide Derived from Human Papillomavirus
LIPIVPGSP

SEQ ID NO: 48742 - protein, 9 aa, Artificial Sequence
  Peptide Derived from Human Papillomavirus
ITDTSTTPV

SEQ ID NO: 48743 - protein, 9 aa, Artificial Sequence
  Peptide Derived from Human Papillomavirus
FITTPTKLI

SEQ ID NO: 48744 - protein, 9 aa, Artificial Sequence
  Peptide Derived from Human Papillomavirus
FLDIVALHR

SEQ ID NO: 48745 - protein, 9 aa, Artificial Sequence
  Peptide Derived from Human Papillomavirus
VLQPPTPAE

SEQ ID NO: 48746 - protein, 9 aa, Artificial Sequence
  Peptide Derived from Human Papillomavirus
LQYGSMGVF

SEQ ID NO: 48747 - protein, 9 aa, Artificial Sequence
  Peptide Derived from Human Papillomavirus
IVSTNPNTV

SEQ ID NO: 48748 - protein, 9 aa, Artificial Sequence
  Peptide Derived from Human Papillomavirus
LQTITPSTY

SEQ ID NO: 48749 - protein, 9 aa, Artificial Sequence
  Peptide Derived from Human Papillomavirus
MDTFIVSTN

SEQ ID NO: 48750 - protein, 9 aa, Artificial Sequence
  Peptide Derived from Human Papillomavirus
FIDAGAPTS

SEQ ID NO: 48751 - protein, 9 aa, Artificial Sequence
  Peptide Derived from Human Papillomavirus
YNIPLVSGP

SEQ ID NO: 48752 - protein, 9 aa, Artificial Sequence
  Peptide Derived from Human Papillomavirus
FTLSSSTIS

SEQ ID NO: 48753 - protein, 9 aa, Artificial Sequence
  Peptide Derived from Human Papillomavirus
IADQILQYG

SEQ ID NO: 48754 - protein, 9 aa, Artificial Sequence
  Peptide Derived from Human Papillomavirus
IPINITDQA

SEQ ID NO: 48755 - protein, 9 aa, Artificial Sequence
  Peptide Derived from Human Papillomavirus
FGGLGIGTG

SEQ ID NO: 48756 - protein, 9 aa, Artificial Sequence
  Peptide Derived from Human Papillomavirus
LSSSTISTH

SEQ ID NO: 48757 - protein, 9 aa, Artificial Sequence
  Peptide Derived from Human Papillomavirus
YDFSTIDSA

SEQ ID NO: 48758 - protein, 9 aa, Artificial Sequence
  Peptide Derived from Human Papillomavirus
INNTVTTVT

SEQ ID NO: 48759 - protein, 9 aa, Artificial Sequence
  Peptide Derived from Human Papillomavirus
YGSMGVFFG

SEQ ID NO: 48760 - protein, 9 aa, Artificial Sequence
  Peptide Derived from Human Papillomavirus
VEGKTIADQ

SEQ ID NO: 48761 - protein, 9 aa, Artificial Sequence
  Peptide Derived from Human Papillomavirus
VSGPDIPIN

SEQ ID NO: 48762 - protein, 9 aa, Artificial Sequence
  Peptide Derived from Human Papillomavirus
LHRPALTSR

SEQ ID NO: 48763 - protein, 9 aa, Artificial Sequence
  Peptide Derived from Human Papillomavirus
LVEETSFID

SEQ ID NO: 48764 - protein, 9 aa, Artificial Sequence
  Peptide Derived from Human Papillomavirus
YYYDFSTID

SEQ ID NO: 48765 - protein, 9 aa, Artificial Sequence
  Peptide Derived from Human Papillomavirus
VRPPLTVDP

SEQ ID NO: 48766 - protein, 9 aa, Artificial Sequence
  Peptide Derived from Human Papillomavirus
VALHRPALT

SEQ ID NO: 48767 - protein, 9 aa, Artificial Sequence
  Peptide Derived from Human Papillomavirus
IVPGSPQYT

SEQ ID NO: 48768 - protein, 9 aa, Artificial Sequence
  Peptide Derived from Human Papillomavirus
FFSDVSLAA

SEQ ID NO: 48769 - protein, 9 aa, Artificial Sequence
  Peptide Derived from Human Papillomavirus
YIPANTTIP

SEQ ID NO: 48770 - protein, 9 aa, Artificial Sequence
  Peptide Derived from Human Papillomavirus
LYDIYADDF

SEQ ID NO: 48771 - protein, 9 aa, Artificial Sequence
  Peptide Derived from Human Papillomavirus
VTTVTTHNN

SEQ ID NO: 48772 - protein, 9 aa, Artificial Sequence
  Peptide Derived from Human Papillomavirus
YEGIDVDNT

SEQ ID NO: 48773 - protein, 9 aa, Artificial Sequence
  Peptide Derived from Human Papillomavirus
FTDPSVLQP

SEQ ID NO: 48774 - protein, 9 aa, Artificial Sequence
  Peptide Derived from Human Papillomavirus
IPFGGAYNI

SEQ ID NO: 48775 - protein, 9 aa, Artificial Sequence
  Peptide Derived from Human Papillomavirus
LDINNTVTT

SEQ ID NO: 48776 - protein, 9 aa, Artificial Sequence
  Peptide Derived from Human Papillomavirus
LDIVALHRP

SEQ ID NO: 48777 - protein, 9 aa, Artificial Sequence
  Peptide Derived from Human Papillomavirus
ITDQAPSLI

SEQ ID NO: 48778 - protein, 9 aa, Artificial Sequence
  Peptide Derived from Human Papillomavirus
VDPVGPSDP

SEQ ID NO: 48779 - protein, 9 aa, Artificial Sequence
  Peptide Derived from Human Papillomavirus
VTSSTPIPG

SEQ ID NO: 48780 - protein, 9 aa, Artificial Sequence
  Peptide Derived from Human Papillomavirus
VSGFSITTS

SEQ ID NO: 48781 - protein, 9 aa, Artificial Sequence
  Peptide Derived from Human Papillomavirus
LQPPTPAET

SEQ ID NO: 48782 - protein, 9 aa, Artificial Sequence
  Peptide Derived from Human Papillomavirus
VPSIPPDVS

SEQ ID NO: 48783 - protein, 9 aa, Artificial Sequence
  Peptide Derived from Human Papillomavirus
LPYFFSDVS

SEQ ID NO: 48784 - protein, 9 aa, Artificial Sequence
  Peptide Derived from Human Papillomavirus
LYSRTTQQV

SEQ ID NO: 48785 - protein, 9 aa, Artificial Sequence
  Peptide Derived from Human Papillomavirus
YFFSDVSLA

SEQ ID NO: 48786 - protein, 9 aa, Artificial Sequence
  Peptide Derived from Human Papillomavirus
LTSRRTGIR

SEQ ID NO: 48787 - protein, 9 aa, Artificial Sequence
  Peptide Derived from Human Papillomavirus
LTVDPVGPS

SEQ ID NO: 48788 - protein, 9 aa, Artificial Sequence
  Peptide Derived from Human Papillomavirus
IRYSRIGNK

SEQ ID NO: 48789 - protein, 9 aa, Artificial Sequence
  Peptide Derived from Human Papillomavirus
YIPLGTRPP

SEQ ID NO: 48790 - protein, 9 aa, Artificial Sequence
  Peptide Derived from Human Papillomavirus
IPANTTIPF

SEQ ID NO: 48791 - protein, 9 aa, Artificial Sequence
  Peptide Derived from Human Papillomavirus
VFFGGLGIG

SEQ ID NO: 48792 - protein, 9 aa, Artificial Sequence
  Peptide Derived from Human Papillomavirus
VARLGLYSR

SEQ ID NO: 48793 - protein, 9 aa, Artificial Sequence
  Peptide Derived from Human Papillomavirus
IPGSRPVAR

SEQ ID NO: 48794 - protein, 9 aa, Artificial Sequence
  Peptide Derived from Human Papillomavirus
LSGYIPANT

SEQ ID NO: 48795 - protein, 9 aa, Artificial Sequence
  Peptide Derived from Human Papillomavirus
LAPVRPPLT

SEQ ID NO: 48796 - protein, 9 aa, Artificial Sequence
  Peptide Derived from Human Papillomavirus
YEEIPMDTF

SEQ ID NO: 48797 - protein, 9 aa, Artificial Sequence
  Peptide Derived from Human Papillomavirus
ITYDNPAYE

SEQ ID NO: 48798 - protein, 9 aa, Artificial Sequence
  Peptide Derived from Human Papillomavirus
VKVVDPAFI

SEQ ID NO: 48799 - protein, 9 aa, Artificial Sequence
  Peptide Derived from Human Papillomavirus
IDAGAPTSV

SEQ ID NO: 48800 - protein, 9 aa, Artificial Sequence
  Peptide Derived from Human Papillomavirus
VPSVPSTSL

SEQ ID NO: 48801 - protein, 9 aa, Artificial Sequence
  Peptide Derived from Human Papillomavirus
VGPSDPSIV

SEQ ID NO: 48802 - protein, 9 aa, Artificial Sequence
  Peptide Derived from Human Papillomavirus
YYDFSTIDS

SEQ ID NO: 48803 - protein, 9 aa, Artificial Sequence
  Peptide Derived from Human Papillomavirus
VDPAFITTP

SEQ ID NO: 48804 - protein, 9 aa, Artificial Sequence
  Peptide Derived from Human Papillomavirus
IPPDVSGFS

SEQ ID NO: 48805 - protein, 9 aa, Artificial Sequence
  Peptide Derived from Human Papillomavirus
VPSTSLSGY

SEQ ID NO: 48806 - protein, 9 aa, Artificial Sequence
  Peptide Derived from Human Papillomavirus
FSITTSTDT

SEQ ID NO: 48807 - protein, 9 aa, Artificial Sequence
  Peptide Derived from Human Papillomavirus
YADDFITDT

SEQ ID NO: 48808 - protein, 9 aa, Artificial Sequence
  Peptide Derived from Human Papillomavirus
IDVDNTLYF

SEQ ID NO: 48809 - protein, 9 aa, Artificial Sequence
  Peptide Derived from Human Papillomavirus
LGTRPPTAT

SEQ ID NO: 48810 - protein, 9 aa, Artificial Sequence
  Peptide Derived from Human Papillomavirus
IGNKQTLRT

SEQ ID NO: 48811 - protein, 9 aa, Artificial Sequence
  Peptide Derived from Human Papillomavirus
FSTIDSAEE

SEQ ID NO: 48812 - protein, 9 aa, Artificial Sequence
  Peptide Derived from Human Papillomavirus
FLKSNCQAK

SEQ ID NO: 48813 - protein, 9 aa, Artificial Sequence
  Peptide Derived from Human Papillomavirus
LKDCATMCK

SEQ ID NO: 48814 - protein, 9 aa, Artificial Sequence
  Peptide Derived from Human Papillomavirus
WYRTGISNI

SEQ ID NO: 48815 - protein, 9 aa, Artificial Sequence
  Peptide Derived from Human Papillomavirus
IQPPKLRSS

SEQ ID NO: 48816 - protein, 9 aa, Artificial Sequence
  Peptide Derived from Human Papillomavirus
WFYVQAIVD

SEQ ID NO: 48817 - protein, 9 aa, Artificial Sequence
  Peptide Derived from Human Papillomavirus
VEATQIQVT

SEQ ID NO: 48818 - protein, 9 aa, Artificial Sequence
  Peptide Derived from Human Papillomavirus
YFDTYMRNA

SEQ ID NO: 48819 - protein, 9 aa, Artificial Sequence
  Peptide Derived from Human Papillomavirus
WGVLILALL

SEQ ID NO: 48820 - protein, 9 aa, Artificial Sequence
  Peptide Derived from Human Papillomavirus
FEYALLADS

SEQ ID NO: 48821 - protein, 9 aa, Artificial Sequence
  Peptide Derived from Human Papillomavirus
WPYLESRIT

SEQ ID NO: 48822 - protein, 9 aa, Artificial Sequence
  Peptide Derived from Human Papillomavirus
YGCSEVEAT

SEQ ID NO: 48823 - protein, 9 aa, Artificial Sequence
  Peptide Derived from Human Papillomavirus
FDLSEMVQW

SEQ ID NO: 48824 - protein, 9 aa, Artificial Sequence
  Peptide Derived from Human Papillomavirus
WSRLDLHEE

SEQ ID NO: 48825 - protein, 9 aa, Artificial Sequence
  Peptide Derived from Human Papillomavirus
MAFEYALLA

SEQ ID NO: 48826 - protein, 9 aa, Artificial Sequence
  Peptide Derived from Human Papillomavirus
MLIQPPKLR

SEQ ID NO: 48827 - protein, 9 aa, Artificial Sequence
  Peptide Derived from Human Papillomavirus
YMRNALDGN

SEQ ID NO: 48828 - protein, 9 aa, Artificial Sequence
  Peptide Derived from Human Papillomavirus
FIQGAVISF

SEQ ID NO: 48829 - protein, 9 aa, Artificial Sequence
  Peptide Derived from Human Papillomavirus
YAHIQCLDC

SEQ ID NO: 48830 - protein, 9 aa, Artificial Sequence
  Peptide Derived from Human Papillomavirus
LIQPFILYA

SEQ ID NO: 48831 - protein, 9 aa, Artificial Sequence
  Peptide Derived from Human Papillomavirus
ISFVNSTSH

SEQ ID NO: 48832 - protein, 9 aa, Artificial Sequence
  Peptide Derived from Human Papillomavirus
VCSGGSTEA

SEQ ID NO: 48833 - protein, 9 aa, Artificial Sequence
  Peptide Derived from Human Papillomavirus
FGTFKLRAG

SEQ ID NO: 48834 - protein, 9 aa, Artificial Sequence
  Peptide Derived from Human Papillomavirus
YVQAIVDKK

SEQ ID NO: 48835 - protein, 9 aa, Artificial Sequence
  Peptide Derived from Human Papillomavirus
LIQLKCPPI

SEQ ID NO: 48836 - protein, 9 aa, Artificial Sequence
  Peptide Derived from Human Papillomavirus
ITFLGALKS

SEQ ID NO: 48837 - protein, 9 aa, Artificial Sequence
  Peptide Derived from Human Papillomavirus
VNPQCTIAQ

SEQ ID NO: 48838 - protein, 9 aa, Artificial Sequence
  Peptide Derived from Human Papillomavirus
VNPTIAEGF

SEQ ID NO: 48839 - protein, 9 aa, Artificial Sequence
  Peptide Derived from Human Papillomavirus
IQGAVISFV

SEQ ID NO: 48840 - protein, 9 aa, Artificial Sequence
  Peptide Derived from Human Papillomavirus
LLRYKCGKS

SEQ ID NO: 48841 - protein, 9 aa, Artificial Sequence
  Peptide Derived from Human Papillomavirus
VMGDTPEWI

SEQ ID NO: 48842 - protein, 9 aa, Artificial Sequence
  Peptide Derived from Human Papillomavirus
LGALKSFLK

SEQ ID NO: 48843 - protein, 9 aa, Artificial Sequence
  Peptide Derived from Human Papillomavirus
FEFPNAFPF

SEQ ID NO: 48844 - protein, 9 aa, Artificial Sequence
  Peptide Derived from Human Papillomavirus
FERTWSRLD

SEQ ID NO: 48845 - protein, 9 aa, Artificial Sequence
  Peptide Derived from Human Papillomavirus
YGLSFTDLV

SEQ ID NO: 48846 - protein, 9 aa, Artificial Sequence
  Peptide Derived from Human Papillomavirus
LVFCGPANT

SEQ ID NO: 48847 - protein, 9 aa, Artificial Sequence
  Peptide Derived from Human Papillomavirus
IQLKCPPIL

SEQ ID NO: 48848 - protein, 9 aa, Artificial Sequence
  Peptide Derived from Human Papillomavirus
FAGGSTENS

SEQ ID NO: 48849 - protein, 9 aa, Artificial Sequence
  Peptide Derived from Human Papillomavirus
FGMSFIHFI

SEQ ID NO: 48850 - protein, 9 aa, Artificial Sequence
  Peptide Derived from Human Papillomavirus
IQPFILYAH

SEQ ID NO: 48851 - protein, 9 aa, Artificial Sequence
  Peptide Derived from Human Papillomavirus
MLDDATTTC

SEQ ID NO: 48852 - protein, 9 aa, Artificial Sequence
  Peptide Derived from Human Papillomavirus
VLILALLRY

SEQ ID NO: 48853 - protein, 9 aa, Artificial Sequence
  Peptide Derived from Human Papillomavirus
LTDTKVAML

SEQ ID NO: 48854 - protein, 9 aa, Artificial Sequence
  Peptide Derived from Human Papillomavirus
LKRKFAGGS

SEQ ID NO: 48855 - protein, 9 aa, Artificial Sequence
  Peptide Derived from Human Papillomavirus
LKCPPILLT

SEQ ID NO: 48856 - protein, 9 aa, Artificial Sequence
  Peptide Derived from Human Papillomavirus
FLKGTPKKN

SEQ ID NO: 48857 - protein, 9 aa, Artificial Sequence
  Peptide Derived from Human Papillomavirus
VPETCMLIQ

SEQ ID NO: 48858 - protein, 9 aa, Artificial Sequence
  Peptide Derived from Human Papillomavirus
YKCGKSRLT

SEQ ID NO: 48859 - protein, 9 aa, Artificial Sequence
  Peptide Derived from Human Papillomavirus
YRTGISNIS

SEQ ID NO: 48860 - protein, 9 aa, Artificial Sequence
  Peptide Derived from Human Papillomavirus
WIRFRCSKI

SEQ ID NO: 48861 - protein, 9 aa, Artificial Sequence
  Peptide Derived from Human Papillomavirus
VFCGPANTG

SEQ ID NO: 48862 - protein, 9 aa, Artificial Sequence
  Peptide Derived from Human Papillomavirus
FYVQAIVDK

SEQ ID NO: 48863 - protein, 9 aa, Artificial Sequence
  Peptide Derived from Human Papillomavirus
IENVNPQCT

SEQ ID NO: 48864 - protein, 9 aa, Artificial Sequence
  Peptide Derived from Human Papillomavirus
IQRLTIIQH

SEQ ID NO: 48865 - protein, 9 aa, Artificial Sequence
  Peptide Derived from Human Papillomavirus
LLTTNIHPA

SEQ ID NO: 48866 - protein, 9 aa, Artificial Sequence
  Peptide Derived from Human Papillomavirus
LRSSVAALY

SEQ ID NO: 48867 - protein, 9 aa, Artificial Sequence
  Peptide Derived from Human Papillomavirus
LETAQALFH

SEQ ID NO: 48868 - protein, 9 aa, Artificial Sequence
  Peptide Derived from Human Papillomavirus
YLKDCATMC

SEQ ID NO: 48869 - protein, 9 aa, Artificial Sequence
  Peptide Derived from Human Papillomavirus
FHAQEVHND

SEQ ID NO: 48870 - protein, 9 aa, Artificial Sequence
  Peptide Derived from Human Papillomavirus
ILYAHIQCL

SEQ ID NO: 48871 - protein, 9 aa, Artificial Sequence
  Peptide Derived from Human Papillomavirus
FDNELTDES

SEQ ID NO: 48872 - protein, 9 aa, Artificial Sequence
  Peptide Derived from Human Papillomavirus
VDTELSPRL

SEQ ID NO: 48873 - protein, 9 aa, Artificial Sequence
  Peptide Derived from Human Papillomavirus
IIQHGIDDS

SEQ ID NO: 48874 - protein, 9 aa, Artificial Sequence
  Peptide Derived from Human Papillomavirus
VAKGLSTLL

SEQ ID NO: 48875 - protein, 9 aa, Artificial Sequence
  Peptide Derived from Human Papillomavirus
LDGNPISID

SEQ ID NO: 48876 - protein, 9 aa, Artificial Sequence
  Peptide Derived from Human Papillomavirus
FTISDSGYG

SEQ ID NO: 48877 - protein, 9 aa, Artificial Sequence
  Peptide Derived from Human Papillomavirus
YLESRITVF

SEQ ID NO: 48878 - protein, 9 aa, Artificial Sequence
  Peptide Derived from Human Papillomavirus
VDFIDTQGT

SEQ ID NO: 48879 - protein, 9 aa, Artificial Sequence
  Peptide Derived from Human Papillomavirus
WLEPLTDTK

SEQ ID NO: 48880 - protein, 9 aa, Artificial Sequence
  Peptide Derived from Human Papillomavirus
LQEISLNSG

SEQ ID NO: 48881 - protein, 9 aa, Artificial Sequence
  Peptide Derived from Human Papillomavirus
IRFRCSKID

SEQ ID NO: 48882 - protein, 9 aa, Artificial Sequence
  Peptide Derived from Human Papillomavirus
LHVPETCML

SEQ ID NO: 48883 - protein, 9 aa, Artificial Sequence
  Peptide Derived from Human Papillomavirus
FGVNPTIAE

SEQ ID NO: 48884 - protein, 9 aa, Artificial Sequence
  Peptide Derived from Human Papillomavirus
VRNFKSDKT

SEQ ID NO: 48885 - protein, 9 aa, Artificial Sequence
  Peptide Derived from Human Papillomavirus
IDNGGTEGN

SEQ ID NO: 48886 - protein, 9 aa, Artificial Sequence
  Peptide Derived from Human Papillomavirus
WIQRLTIIQ

SEQ ID NO: 48887 - protein, 9 aa, Artificial Sequence
  Peptide Derived from Human Papillomavirus
FWLEPLTDT

SEQ ID NO: 48888 - protein, 9 aa, Artificial Sequence
  Peptide Derived from Human Papillomavirus
WTYFDTYMR

SEQ ID NO: 48889 - protein, 9 aa, Artificial Sequence
  Peptide Derived from Human Papillomavirus
LSFTDLVRN

SEQ ID NO: 48890 - protein, 9 aa, Artificial Sequence
  Peptide Derived from Human Papillomavirus
LYWYRTGIS

SEQ ID NO: 48891 - protein, 9 aa, Artificial Sequence
  Peptide Derived from Human Papillomavirus
LDDATTTCW

SEQ ID NO: 48892 - protein, 9 aa, Artificial Sequence
  Peptide Derived from Human Papillomavirus
IDTQGTFCE

SEQ ID NO: 48893 - protein, 9 aa, Artificial Sequence
  Peptide Derived from Human Papillomavirus
FPNAFPFDK

SEQ ID NO: 48894 - protein, 9 aa, Artificial Sequence
  Peptide Derived from Human Papillomavirus
FVNSTSHFW

SEQ ID NO: 48895 - protein, 9 aa, Artificial Sequence
  Peptide Derived from Human Papillomavirus
IVDKKTGDV

SEQ ID NO: 48896 - protein, 9 aa, Artificial Sequence
  Peptide Derived from Human Papillomavirus
LRYQQIEFI

SEQ ID NO: 48897 - protein, 9 aa, Artificial Sequence
  Peptide Derived from Human Papillomavirus
FKSDKTTCT

SEQ ID NO: 48898 - protein, 9 aa, Artificial Sequence
  Peptide Derived from Human Papillomavirus
IFGVNPTIA

SEQ ID NO: 48899 - protein, 9 aa, Artificial Sequence
  Peptide Derived from Human Papillomavirus
LILALLRYK

SEQ ID NO: 48900 - protein, 9 aa, Artificial Sequence
  Peptide Derived from Human Papillomavirus
FRCSKIDEG

SEQ ID NO: 48901 - protein, 9 aa, Artificial Sequence
  Peptide Derived from Human Papillomavirus
LESRITVFE

SEQ ID NO: 48902 - protein, 9 aa, Artificial Sequence
  Peptide Derived from Human Papillomavirus
IQCLDCKWG

SEQ ID NO: 48903 - protein, 9 aa, Artificial Sequence
  Peptide Derived from Human Papillomavirus
LADSNSNAA

SEQ ID NO: 48904 - protein, 9 aa, Artificial Sequence
  Peptide Derived from Human Papillomavirus
WDKTATCVS

SEQ ID NO: 48905 - protein, 9 aa, Artificial Sequence
  Peptide Derived from Human Papillomavirus
YGQTSAATR

SEQ ID NO: 48906 - protein, 9 aa, Artificial Sequence
  Peptide Derived from Human Papillomavirus
VSHRGLYYV

SEQ ID NO: 48907 - protein, 9 aa, Artificial Sequence
  Peptide Derived from Human Papillomavirus
ISKSKAHKA

SEQ ID NO: 48908 - protein, 9 aa, Artificial Sequence
  Peptide Derived from Human Papillomavirus
LWNTEPTHC

SEQ ID NO: 48909 - protein, 9 aa, Artificial Sequence
  Peptide Derived from Human Papillomavirus
YGNTGTWEV

SEQ ID NO: 48910 - protein, 9 aa, Artificial Sequence
  Peptide Derived from Human Papillomavirus
YVAWDSVYY

SEQ ID NO: 48911 - protein, 9 aa, Artificial Sequence
  Peptide Derived from Human Papillomavirus
VSATQLVKQ

SEQ ID NO: 48912 - protein, 9 aa, Artificial Sequence
  Peptide Derived from Human Papillomavirus
IQYWQLIRW

SEQ ID NO: 48913 - protein, 9 aa, Artificial Sequence
  Peptide Derived from Human Papillomavirus
YYMTDAGTW

SEQ ID NO: 48914 - protein, 9 aa, Artificial Sequence
  Peptide Derived from Human Papillomavirus
WNTEPTHCF

SEQ ID NO: 48915 - protein, 9 aa, Artificial Sequence
  Peptide Derived from Human Papillomavirus
MALQGLAQS

SEQ ID NO: 48916 - protein, 9 aa, Artificial Sequence
  Peptide Derived from Human Papillomavirus
FGNNVIDCN

SEQ ID NO: 48917 - protein, 9 aa, Artificial Sequence
  Peptide Derived from Human Papillomavirus
IELQMALQG

SEQ ID NO: 48918 - protein, 9 aa, Artificial Sequence
  Peptide Derived from Human Papillomavirus
VPAYNISKS

SEQ ID NO: 48919 - protein, 9 aa, Artificial Sequence
  Peptide Derived from Human Papillomavirus
LNHQVVPAY

SEQ ID NO: 48920 - protein, 9 aa, Artificial Sequence
  Peptide Derived from Human Papillomavirus
YNTFYIEFK

SEQ ID NO: 48921 - protein, 9 aa, Artificial Sequence
  Peptide Derived from Human Papillomavirus
LSERLSCVQ

SEQ ID NO: 48922 - protein, 9 aa, Artificial Sequence
  Peptide Derived from Human Papillomavirus
VAIPDSVQI

SEQ ID NO: 48923 - protein, 9 aa, Artificial Sequence
  Peptide Derived from Human Papillomavirus
VQDKIIDHY

SEQ ID NO: 48924 - protein, 9 aa, Artificial Sequence
  Peptide Derived from Human Papillomavirus
VAWDSVYYM

SEQ ID NO: 48925 - protein, 9 aa, Artificial Sequence
  Peptide Derived from Human Papillomavirus
IDCNDSMCS

SEQ ID NO: 48926 - protein, 9 aa, Artificial Sequence
  Peptide Derived from Human Papillomavirus
LGAATPTGN

SEQ ID NO: 48927 - protein, 9 aa, Artificial Sequence
  Peptide Derived from Human Papillomavirus
YIEFKSECE

SEQ ID NO: 48928 - protein, 9 aa, Artificial Sequence
  Peptide Derived from Human Papillomavirus
YSSTVSVGT

SEQ ID NO: 48929 - protein, 9 aa, Artificial Sequence
  Peptide Derived from Human Papillomavirus
LCSGNTTPI

SEQ ID NO: 48930 - protein, 9 aa, Artificial Sequence
  Peptide Derived from Human Papillomavirus
FLNTVAIPD

SEQ ID NO: 48931 - protein, 9 aa, Artificial Sequence
  Peptide Derived from Human Papillomavirus
YRDISSTWH

SEQ ID NO: 48932 - protein, 9 aa, Artificial Sequence
  Peptide Derived from Human Papillomavirus
VSVGTAKTY

SEQ ID NO: 48933 - protein, 9 aa, Artificial Sequence
  Peptide Derived from Human Papillomavirus
WHWTGAGNE

SEQ ID NO: 48934 - protein, 9 aa, Artificial Sequence
  Peptide Derived from Human Papillomavirus
WTLQDTCEE

SEQ ID NO: 48935 - protein, 9 aa, Artificial Sequence
  Peptide Derived from Human Papillomavirus
LNTVAIPDS

SEQ ID NO: 48936 - protein, 9 aa, Artificial Sequence
  Peptide Derived from Human Papillomavirus
VGTAKTYGQ

SEQ ID NO: 48937 - protein, 9 aa, Artificial Sequence
  Peptide Derived from Human Papillomavirus
LQHTPSPYS

SEQ ID NO: 48938 - protein, 9 aa, Artificial Sequence
  Peptide Derived from Human Papillomavirus
LLGAATPTG

SEQ ID NO: 48939 - protein, 9 aa, Artificial Sequence
  Peptide Derived from Human Papillomavirus
YNISKSKAH

SEQ ID NO: 48940 - protein, 9 aa, Artificial Sequence
  Peptide Derived from Human Papillomavirus
MTDAGTWDK

SEQ ID NO: 48941 - protein, 9 aa, Artificial Sequence
  Peptide Derived from Human Papillomavirus
IRWENAIFF

SEQ ID NO: 48942 - protein, 9 aa, Artificial Sequence
  Peptide Derived from Human Papillomavirus
LSLIFLFCF

SEQ ID NO: 48943 - protein, 9 aa, Artificial Sequence
  Peptide Derived from Human Papillomavirus
LVFVYIVVI

SEQ ID NO: 48944 - protein, 9 aa, Artificial Sequence
  Peptide Derived from Human Papillomavirus
WVLVFVYIV

SEQ ID NO: 48945 - protein, 9 aa, Artificial Sequence
  Peptide Derived from Human Papillomavirus
VPLLPSVCM

SEQ ID NO: 48946 - protein, 9 aa, Artificial Sequence
  Peptide Derived from Human Papillomavirus
VCMYVCCHV

SEQ ID NO: 48947 - protein, 9 aa, Artificial Sequence
  Peptide Derived from Human Papillomavirus
LPMLLLHIH

SEQ ID NO: 48948 - protein, 9 aa, Artificial Sequence
  Peptide Derived from Human Papillomavirus
VCCHVPLLP

SEQ ID NO: 48949 - protein, 9 aa, Artificial Sequence
  Peptide Derived from Human Papillomavirus
LLPMLLLHI

SEQ ID NO: 48950 - protein, 9 aa, Artificial Sequence
  Peptide Derived from Human Papillomavirus
YVFCFLLPM

SEQ ID NO: 48951 - protein, 9 aa, Artificial Sequence
  Peptide Derived from Human Papillomavirus
IVVITSPAT

SEQ ID NO: 48952 - protein, 9 aa, Artificial Sequence
  Peptide Derived from Human Papillomavirus
LLPSVCMCA

SEQ ID NO: 48953 - protein, 9 aa, Artificial Sequence
  Peptide Derived from Human Papillomavirus
FCFCVCMYV

SEQ ID NO: 48954 - protein, 9 aa, Artificial Sequence
  Peptide Derived from Human Papillomavirus
ITSPATAFT

SEQ ID NO: 48955 - protein, 9 aa, Artificial Sequence
  Peptide Derived from Human Papillomavirus
LFCFCVCMY

SEQ ID NO: 48956 - protein, 9 aa, Artificial Sequence
  Peptide Derived from Human Papillomavirus
MLLLHIHAI

SEQ ID NO: 48957 - protein, 9 aa, Artificial Sequence
  Peptide Derived from Human Papillomavirus
VYIVVITSP

SEQ ID NO: 48958 - protein, 9 aa, Artificial Sequence
  Peptide Derived from Human Papillomavirus
YAWVLVFVY

SEQ ID NO: 48959 - protein, 9 aa, Artificial Sequence
  Peptide Derived from Human Papillomavirus
LHIHAILSL

SEQ ID NO: 48960 - protein, 9 aa, Artificial Sequence
  Peptide Derived from Human Papillomavirus
LIFLFCFCV

SEQ ID NO: 48961 - protein, 9 aa, Artificial Sequence
  Peptide Derived from Human Papillomavirus
LLHIHAILS

SEQ ID NO: 48962 - protein, 9 aa, Artificial Sequence
  Peptide Derived from Human Papillomavirus
FLFCFCVCM

SEQ ID NO: 48963 - protein, 9 aa, Artificial Sequence
  Peptide Derived from Human Papillomavirus
VFCFLLPML

SEQ ID NO: 48964 - protein, 9 aa, Artificial Sequence
  Peptide Derived from Human Papillomavirus
YVCCHVPLL

SEQ ID NO: 48965 - protein, 9 aa, Artificial Sequence
  Peptide Derived from Human Papillomavirus
FLLPMLLLH

SEQ ID NO: 48966 - protein, 9 aa, Artificial Sequence
  Peptide Derived from Human Papillomavirus
YIVVITSPA

SEQ ID NO: 48967 - protein, 9 aa, Artificial Sequence
  Peptide Derived from Human Papillomavirus
FVYIVVITS

SEQ ID NO: 48968 - protein, 9 aa, Artificial Sequence
  Peptide Derived from Human Papillomavirus
LPSVCMCAY

SEQ ID NO: 48969 - protein, 9 aa, Artificial Sequence
  Peptide Derived from Human Papillomavirus
VVITSPATA

SEQ ID NO: 48970 - protein, 9 aa, Artificial Sequence
  Peptide Derived from Human Papillomavirus
FCFLLPMLL

SEQ ID NO: 48971 - protein, 9 aa, Artificial Sequence
  Peptide Derived from Human Papillomavirus
VFVYIVVIT

SEQ ID NO: 48972 - protein, 9 aa, Artificial Sequence
  Peptide Derived from Human Papillomavirus
VITSPATAF

SEQ ID NO: 48973 - protein, 9 aa, Artificial Sequence
  Peptide Derived from Human Papillomavirus
ITCVYCKTV

SEQ ID NO: 48974 - protein, 9 aa, Artificial Sequence
  Peptide Derived from Human Papillomavirus
VVYRDSIPH

SEQ ID NO: 48975 - protein, 9 aa, Artificial Sequence
  Peptide Derived from Human Papillomavirus
FKDLFVVYR

SEQ ID NO: 48976 - protein, 9 aa, Artificial Sequence
  Peptide Derived from Human Papillomavirus
YRDSIPHAA

SEQ ID NO: 48977 - protein, 9 aa, Artificial Sequence
  Peptide Derived from Human Papillomavirus
LRCQKPLNP

SEQ ID NO: 48978 - protein, 9 aa, Artificial Sequence
  Peptide Derived from Human Papillomavirus
VYCKTVLEL

SEQ ID NO: 48979 - protein, 9 aa, Artificial Sequence
  Peptide Derived from Human Papillomavirus
LELTEVFEF

SEQ ID NO: 48980 - protein, 9 aa, Artificial Sequence
  Peptide Derived from Human Papillomavirus
LTNTGLYNL

SEQ ID NO: 48981 - protein, 9 aa, Artificial Sequence
  Peptide Derived from Human Papillomavirus
VYRDSIPHA

SEQ ID NO: 48982 - protein, 9 aa, Artificial Sequence
  Peptide Derived from Human Papillomavirus
IEITCVYCK

SEQ ID NO: 48983 - protein, 9 aa, Artificial Sequence
  Peptide Derived from Human Papillomavirus
LLIRCLRCQ

SEQ ID NO: 48984 - protein, 9 aa, Artificial Sequence
  Peptide Derived from Human Papillomavirus
IRCLRCQKP

SEQ ID NO: 48985 - protein, 9 aa, Artificial Sequence
  Peptide Derived from Human Papillomavirus
LYNLLIRCL

SEQ ID NO: 48986 - protein, 9 aa, Artificial Sequence
  Peptide Derived from Human Papillomavirus
LQDIEITCV

SEQ ID NO: 48987 - protein, 9 aa, Artificial Sequence
  Peptide Derived from Human Papillomavirus
LPDLCTELN

SEQ ID NO: 48988 - protein, 9 aa, Artificial Sequence
  Peptide Derived from Human Papillomavirus
IPHAACHKC

SEQ ID NO: 48989 - protein, 9 aa, Artificial Sequence
  Peptide Derived from Human Papillomavirus
YKLPDLCTE

SEQ ID NO: 48990 - protein, 9 aa, Artificial Sequence
  Peptide Derived from Human Papillomavirus
VYGDTLEKL

SEQ ID NO: 48991 - protein, 9 aa, Artificial Sequence
  Peptide Derived from Human Papillomavirus
YCKTVLELT

SEQ ID NO: 48992 - protein, 9 aa, Artificial Sequence
  Peptide Derived from Human Papillomavirus
FAFKDLFVV

SEQ ID NO: 48993 - protein, 9 aa, Artificial Sequence
  Peptide Derived from Human Papillomavirus
MHGPKATLQ

SEQ ID NO: 48994 - protein, 9 aa, Artificial Sequence
  Peptide Derived from Human Papillomavirus
LFLNTLSFV

SEQ ID NO: 48995 - protein, 9 aa, Artificial Sequence
  Peptide Derived from Human Papillomavirus
LPARRAEPQ

SEQ ID NO: 48996 - protein, 9 aa, Artificial Sequence
  Peptide Derived from Human Papillomavirus
VNHQHLPAR

SEQ ID NO: 48997 - protein, 9 aa, Artificial Sequence
  Peptide Derived from Human Papillomavirus
VVESSADDL

SEQ ID NO: 48998 - protein, 9 aa, Artificial Sequence
  Peptide Derived from Human Papillomavirus
LQDIVLHLE

SEQ ID NO: 48999 - protein, 9 aa, Artificial Sequence
  Peptide Derived from Human Papillomavirus
LSFVCPWCA

SEQ ID NO: 49000 - protein, 9 aa, Artificial Sequence
  Peptide Derived from Human Papillomavirus
FQQLFLNTL

SEQ ID NO: 49001 - protein, 9 aa, Artificial Sequence
  Peptide Derived from Human Papillomavirus
VCPWCASQQ

SEQ ID NO: 49002 - protein, 9 aa, Artificial Sequence
  Peptide Derived from Human Papillomavirus
VLHLEPQNE

SEQ ID NO: 49003 - protein, 9 aa, Artificial Sequence
  Peptide Derived from Human Papillomavirus
IPVDLLCHE

SEQ ID NO: 49004 - protein, 9 aa, Artificial Sequence
  Peptide Derived from Human Papillomavirus
FLNTLSFVC

SEQ ID NO: 49005 - protein, 9 aa, Artificial Sequence
  Peptide Derived from Human Papillomavirus
MLCMCCKCE

SEQ ID NO: 49006 - protein, 9 aa, Artificial Sequence
  Peptide Derived from Human Papillomavirus
LVVESSADD

SEQ ID NO: 49007 - protein, 9 aa, Artificial Sequence
  Peptide Derived from Human Papillomavirus
FVCPWCASQ

SEQ ID NO: 49008 - protein, 9 aa, Artificial Sequence
  Peptide Derived from Human Papillomavirus
LCHEQLSDS

SEQ ID NO: 49009 - protein, 9 aa, Artificial Sequence
  Peptide Derived from Human Papillomavirus
LYTRVLILH

SEQ ID NO: 49010 - protein, 9 aa, Artificial Sequence
  Peptide Derived from Human Papillomavirus
MSYIHSMNS

SEQ ID NO: 49011 - protein, 9 aa, Artificial Sequence
  Peptide Derived from Human Papillomavirus
MGDTVPQSL

SEQ ID NO: 49012 - protein, 9 aa, Artificial Sequence
  Peptide Derived from Human Papillomavirus
IGEHWAKGT

SEQ ID NO: 49013 - protein, 9 aa, Artificial Sequence
  Peptide Derived from Human Papillomavirus
YRVFRVQLP

SEQ ID NO: 49014 - protein, 9 aa, Artificial Sequence
  Peptide Derived from Human Papillomavirus
YIILFLRNV

SEQ ID NO: 49015 - protein, 9 aa, Artificial Sequence
  Peptide Derived from Human Papillomavirus
LELKNTVLE

SEQ ID NO: 49016 - protein, 9 aa, Artificial Sequence
  Peptide Derived from Human Papillomavirus
VTPTSIFYH

SEQ ID NO: 49017 - protein, 9 aa, Artificial Sequence
  Peptide Derived from Human Papillomavirus
FIFQLCTIT

SEQ ID NO: 49018 - protein, 9 aa, Artificial Sequence
  Peptide Derived from Human Papillomavirus
VYLPPPSVA

SEQ ID NO: 49019 - protein, 9 aa, Artificial Sequence
  Peptide Derived from Human Papillomavirus
IYNPETQRL

SEQ ID NO: 49020 - protein, 9 aa, Artificial Sequence
  Peptide Derived from Human Papillomavirus
FGVPPPPTT

SEQ ID NO: 49021 - protein, 9 aa, Artificial Sequence
  Peptide Derived from Human Papillomavirus
LDICQSICK

SEQ ID NO: 49022 - protein, 9 aa, Artificial Sequence
  Peptide Derived from Human Papillomavirus
LRREQLFAR

SEQ ID NO: 49023 - protein, 9 aa, Artificial Sequence
  Peptide Derived from Human Papillomavirus
MALWRPSDN

SEQ ID NO: 49024 - protein, 9 aa, Artificial Sequence
  Peptide Derived from Human Papillomavirus
FLQMALWRP

SEQ ID NO: 49025 - protein, 9 aa, Artificial Sequence
  Peptide Derived from Human Papillomavirus
LQDTKCEVP

SEQ ID NO: 49026 - protein, 9 aa, Artificial Sequence
  Peptide Derived from Human Papillomavirus
VVDTTPSTN

SEQ ID NO: 49027 - protein, 9 aa, Artificial Sequence
  Peptide Derived from Human Papillomavirus
WAKGTACKS

SEQ ID NO: 49028 - protein, 9 aa, Artificial Sequence
  Peptide Derived from Human Papillomavirus
YFRVPAGGG

SEQ ID NO: 49029 - protein, 9 aa, Artificial Sequence
  Peptide Derived from Human Papillomavirus
YHPRPLPLH

SEQ ID NO: 49030 - protein, 9 aa, Artificial Sequence
  Peptide Derived from Human Papillomavirus
LGVGLSGHP

SEQ ID NO: 49031 - protein, 9 aa, Artificial Sequence
  Peptide Derived from Human Papillomavirus
VYSPSPSGS

SEQ ID NO: 49032 - protein, 9 aa, Artificial Sequence
  Peptide Derived from Human Papillomavirus
IGRGQPLGV

SEQ ID NO: 49033 - protein, 9 aa, Artificial Sequence
  Peptide Derived from Human Papillomavirus
ICGHYIILF

SEQ ID NO: 49034 - protein, 9 aa, Artificial Sequence
  Peptide Derived from Human Papillomavirus
LFVTVVDTT

SEQ ID NO: 49035 - protein, 9 aa, Artificial Sequence
  Peptide Derived from Human Papillomavirus
LCTITLTAD

SEQ ID NO: 49036 - protein, 9 aa, Artificial Sequence
  Peptide Derived from Human Papillomavirus
MNSSILEDW

SEQ ID NO: 49037 - protein, 9 aa, Artificial Sequence
  Peptide Derived from Human Papillomavirus
LRNVNVFPI

SEQ ID NO: 49038 - protein, 9 aa, Artificial Sequence
  Peptide Derived from Human Papillomavirus
YHLLPLYGP

SEQ ID NO: 49039 - protein, 9 aa, Artificial Sequence
  Peptide Derived from Human Papillomavirus
YMVHIIICG

SEQ ID NO: 49040 - protein, 9 aa, Artificial Sequence
  Peptide Derived from Human Papillomavirus
VPLDICQSI

SEQ ID NO: 49041 - protein, 9 aa, Artificial Sequence
  Peptide Derived from Human Papillomavirus
LPDTSIYNP

SEQ ID NO: 49042 - protein, 9 aa, Artificial Sequence
  Peptide Derived from Human Papillomavirus
FWNVDLKEK

SEQ ID NO: 49043 - protein, 9 aa, Artificial Sequence
  Peptide Derived from Human Papillomavirus
IPKVSAYQY

SEQ ID NO: 49044 - protein, 9 aa, Artificial Sequence
  Peptide Derived from Human Papillomavirus
LGCAPAIGE

SEQ ID NO: 49045 - protein, 9 aa, Artificial Sequence
  Peptide Derived from Human Papillomavirus
WNFGVPPPP

SEQ ID NO: 49046 - protein, 9 aa, Artificial Sequence
  Peptide Derived from Human Papillomavirus
ILVYMVHII

SEQ ID NO: 49047 - protein, 9 aa, Artificial Sequence
  Peptide Derived from Human Papillomavirus
IFQLCTITL

SEQ ID NO: 49048 - protein, 9 aa, Artificial Sequence
  Peptide Derived from Human Papillomavirus
VNVFPIFLQ

SEQ ID NO: 49049 - protein, 9 aa, Artificial Sequence
  Peptide Derived from Human Papillomavirus
MVHIIICGH

SEQ ID NO: 49050 - protein, 9 aa, Artificial Sequence
  Peptide Derived from Human Papillomavirus
YTRVLILHY

SEQ ID NO: 49051 - protein, 9 aa, Artificial Sequence
  Peptide Derived from Human Papillomavirus
IHSMNSSIL

SEQ ID NO: 49052 - protein, 9 aa, Artificial Sequence
  Peptide Derived from Human Papillomavirus
VPPPPTTSL

SEQ ID NO: 49053 - protein, 9 aa, Artificial Sequence
  Peptide Derived from Human Papillomavirus
YWLHKAQGH

SEQ ID NO: 49054 - protein, 9 aa, Artificial Sequence
  Peptide Derived from Human Papillomavirus
LEDGDMVDT

SEQ ID NO: 49055 - protein, 9 aa, Artificial Sequence
  Peptide Derived from Human Papillomavirus
YLPPPSVAR

SEQ ID NO: 49056 - protein, 9 aa, Artificial Sequence
  Peptide Derived from Human Papillomavirus
LKEKFSLDL

SEQ ID NO: 49057 - protein, 9 aa, Artificial Sequence
  Peptide Derived from Human Papillomavirus
VFPIFLQMA

SEQ ID NO: 49058 - protein, 9 aa, Artificial Sequence
  Peptide Derived from Human Papillomavirus
VDYKQTQLC

SEQ ID NO: 49059 - protein, 9 aa, Artificial Sequence
  Peptide Derived from Human Papillomavirus
ICQSICKYP

SEQ ID NO: 49060 - protein, 9 aa, Artificial Sequence
  Peptide Derived from Human Papillomavirus
LKNTVLEDG

SEQ ID NO: 49061 - protein, 9 aa, Artificial Sequence
  Peptide Derived from Human Papillomavirus
LHSILVYMV

SEQ ID NO: 49062 - protein, 9 aa, Artificial Sequence
  Peptide Derived from Human Papillomavirus
FGLPDTSIY

SEQ ID NO: 49063 - protein, 9 aa, Artificial Sequence
  Peptide Derived from Human Papillomavirus
LYIKGTGMP

SEQ ID NO: 49064 - protein, 9 aa, Artificial Sequence
  Peptide Derived from Human Papillomavirus
LPLHSILVY

SEQ ID NO: 49065 - protein, 9 aa, Artificial Sequence
  Peptide Derived from Human Papillomavirus
LRRKPTIGP

SEQ ID NO: 49066 - protein, 9 aa, Artificial Sequence
  Peptide Derived from Human Papillomavirus
FQLCTITLT

SEQ ID NO: 49067 - protein, 9 aa, Artificial Sequence
  Peptide Derived from Human Papillomavirus
ILGCAPAIG

SEQ ID NO: 49068 - protein, 9 aa, Artificial Sequence
  Peptide Derived from Human Papillomavirus
VTVVDTTPS

SEQ ID NO: 49069 - protein, 9 aa, Artificial Sequence
  Peptide Derived from Human Papillomavirus
LCILGCAPA

SEQ ID NO: 49070 - protein, 9 aa, Artificial Sequence
  Peptide Derived from Human Papillomavirus
LGRKFLVQA

SEQ ID NO: 49071 - protein, 9 aa, Artificial Sequence
  Peptide Derived from Human Papillomavirus
VFRVQLPDP

SEQ ID NO: 49072 - protein, 9 aa, Artificial Sequence
  Peptide Derived from Human Papillomavirus
WNRAGTMGD

SEQ ID NO: 49073 - protein, 9 aa, Artificial Sequence
  Peptide Derived from Human Papillomavirus
LVQAGLRRK

SEQ ID NO: 49074 - protein, 9 aa, Artificial Sequence
  Peptide Derived from Human Papillomavirus
WACAGVEIG

SEQ ID NO: 49075 - protein, 9 aa, Artificial Sequence
  Peptide Derived from Human Papillomavirus
ILHYHLLPL

SEQ ID NO: 49076 - protein, 9 aa, Artificial Sequence
  Peptide Derived from Human Papillomavirus
YSPSPSGSI

SEQ ID NO: 49077 - protein, 9 aa, Artificial Sequence
  Peptide Derived from Human Papillomavirus
VRDNVSVDY

SEQ ID NO: 49078 - protein, 9 aa, Artificial Sequence
  Peptide Derived from Human Papillomavirus
IVTSDSQLF

SEQ ID NO: 49079 - protein, 9 aa, Artificial Sequence
  Peptide Derived from Human Papillomavirus
YHAGSSRLL

SEQ ID NO: 49080 - protein, 9 aa, Artificial Sequence
  Peptide Derived from Human Papillomavirus
VYMVHIIIC

SEQ ID NO: 49081 - protein, 9 aa, Artificial Sequence
  Peptide Derived from Human Papillomavirus
LDQYPLGRK

SEQ ID NO: 49082 - protein, 9 aa, Artificial Sequence
  Peptide Derived from Human Papillomavirus
IKGTGMPAS

SEQ ID NO: 49083 - protein, 9 aa, Artificial Sequence
  Peptide Derived from Human Papillomavirus
VEEYDLQFI

SEQ ID NO: 49084 - protein, 9 aa, Artificial Sequence
  Peptide Derived from Human Papillomavirus
LTVGNPYFR

SEQ ID NO: 49085 - protein, 9 aa, Artificial Sequence
  Peptide Derived from Human Papillomavirus
LSQGDCPPL

SEQ ID NO: 49086 - protein, 9 aa, Artificial Sequence
  Peptide Derived from Human Papillomavirus
LTICASTQS

SEQ ID NO: 49087 - protein, 9 aa, Artificial Sequence
  Peptide Derived from Human Papillomavirus
YKQTQLCIL

SEQ ID NO: 49088 - protein, 9 aa, Artificial Sequence
  Peptide Derived from Human Papillomavirus
YVTPTSIFY

SEQ ID NO: 49089 - protein, 9 aa, Artificial Sequence
  Peptide Derived from Human Papillomavirus
LTADVMSYI

SEQ ID NO: 49090 - protein, 9 aa, Artificial Sequence
  Peptide Derived from Human Papillomavirus
LVWACAGVE

SEQ ID NO: 49091 - protein, 9 aa, Artificial Sequence
  Peptide Derived from Human Papillomavirus
FYHAGSSRL

SEQ ID NO: 49092 - protein, 9 aa, Artificial Sequence
  Peptide Derived from Human Papillomavirus
LPPPSVARV

SEQ ID NO: 49093 - protein, 9 aa, Artificial Sequence
  Peptide Derived from Human Papillomavirus
FVQSVAITC

SEQ ID NO: 49094 - protein, 9 aa, Artificial Sequence
  Peptide Derived from Human Papillomavirus
YRFVQSVAI

SEQ ID NO: 49095 - protein, 9 aa, Artificial Sequence
  Peptide Derived from Human Papillomavirus
YDLQFIFQL

SEQ ID NO: 49096 - protein, 9 aa, Artificial Sequence
  Peptide Derived from Human Papillomavirus
IFLQMALWR

SEQ ID NO: 49097 - protein, 9 aa, Artificial Sequence
  Peptide Derived from Human Papillomavirus
VQLPDPNKF

SEQ ID NO: 49098 - protein, 9 aa, Artificial Sequence
  Peptide Derived from Human Papillomavirus
LHYHLLPLY

SEQ ID NO: 49099 - protein, 9 aa, Artificial Sequence
  Peptide Derived from Human Papillomavirus
VDTTPSTNL

SEQ ID NO: 49100 - protein, 9 aa, Artificial Sequence
  Peptide Derived from Human Papillomavirus
VHIIICGHY

SEQ ID NO: 49101 - protein, 9 aa, Artificial Sequence
  Peptide Derived from Human Papillomavirus
LKFWNVDLK

SEQ ID NO: 49102 - protein, 9 aa, Artificial Sequence
  Peptide Derived from Human Papillomavirus
MDFSTLQDT

SEQ ID NO: 49103 - protein, 9 aa, Artificial Sequence
  Peptide Derived from Human Papillomavirus
LYHPRPLPL

SEQ ID NO: 49104 - protein, 9 aa, Artificial Sequence
  Peptide Derived from Human Papillomavirus
LPLYGPLYH

SEQ ID NO: 49105 - protein, 9 aa, Artificial Sequence
  Peptide Derived from Human Papillomavirus
LFLRNVNVF

SEQ ID NO: 49106 - protein, 9 aa, Artificial Sequence
  Peptide Derived from Human Papillomavirus
LDDTESSHA

SEQ ID NO: 49107 - protein, 9 aa, Artificial Sequence
  Peptide Derived from Human Papillomavirus
YLQMSADPY

SEQ ID NO: 49108 - protein, 9 aa, Artificial Sequence
  Peptide Derived from Human Papillomavirus
VQSVAITCQ

SEQ ID NO: 49109 - protein, 9 aa, Artificial Sequence
  Peptide Derived from Human Papillomavirus
FRVQLPDPN

SEQ ID NO: 49110 - protein, 9 aa, Artificial Sequence
  Peptide Derived from Human Papillomavirus
MVSHRAARR

SEQ ID NO: 49111 - protein, 9 aa, Artificial Sequence
  Peptide Derived from Human Papillomavirus
VSHRAARRK

SEQ ID NO: 49112 - protein, 9 aa, Artificial Sequence
  Peptide Derived from Human Papillomavirus
MDPAVPVPS

SEQ ID NO: 49113 - protein, 9 aa, Artificial Sequence
  Peptide Derived from Human Papillomavirus
ILQWSSLGI

SEQ ID NO: 49114 - protein, 9 aa, Artificial Sequence
  Peptide Derived from Human Papillomavirus
VFVGTPTSG

SEQ ID NO: 49115 - protein, 9 aa, Artificial Sequence
  Peptide Derived from Human Papillomavirus
YSNVTVPLT

SEQ ID NO: 49116 - protein, 9 aa, Artificial Sequence
  Peptide Derived from Human Papillomavirus
FTRSGTQIG

SEQ ID NO: 49117 - protein, 9 aa, Artificial Sequence
  Peptide Derived from Human Papillomavirus
VPSRSTTSF

SEQ ID NO: 49118 - protein, 9 aa, Artificial Sequence
  Peptide Derived from Human Papillomavirus
LPSTTSVWP

SEQ ID NO: 49119 - protein, 9 aa, Artificial Sequence
  Peptide Derived from Human Papillomavirus
LQWSSLGIF

SEQ ID NO: 49120 - protein, 9 aa, Artificial Sequence
  Peptide Derived from Human Papillomavirus
LFDIYADDM

SEQ ID NO: 49121 - protein, 9 aa, Artificial Sequence
  Peptide Derived from Human Papillomavirus
VVTSGAPRP

SEQ ID NO: 49122 - protein, 9 aa, Artificial Sequence
  Peptide Derived from Human Papillomavirus
ISSTPLPTV

SEQ ID NO: 49123 - protein, 9 aa, Artificial Sequence
  Peptide Derived from Human Papillomavirus
LQTFASSGT

SEQ ID NO: 49124 - protein, 9 aa, Artificial Sequence
  Peptide Derived from Human Papillomavirus
FKYSPTISS

SEQ ID NO: 49125 - protein, 9 aa, Artificial Sequence
  Peptide Derived from Human Papillomavirus
VDTTLTFDP

SEQ ID NO: 49126 - protein, 9 aa, Artificial Sequence
  Peptide Derived from Human Papillomavirus
YSPTISSAS

SEQ ID NO: 49127 - protein, 9 aa, Artificial Sequence
  Peptide Derived from Human Papillomavirus
LGQRATMFT

SEQ ID NO: 49128 - protein, 9 aa, Artificial Sequence
  Peptide Derived from Human Papillomavirus
ITSAGTTTP

SEQ ID NO: 49129 - protein, 9 aa, Artificial Sequence
  Peptide Derived from Human Papillomavirus
LGGLGIGTG

SEQ ID NO: 49130 - protein, 9 aa, Artificial Sequence
  Peptide Derived from Human Papillomavirus
FVGTPTSGT

SEQ ID NO: 49131 - protein, 9 aa, Artificial Sequence
  Peptide Derived from Human Papillomavirus
ITLPSTTSV

SEQ ID NO: 49132 - protein, 9 aa, Artificial Sequence
  Peptide Derived from Human Papillomavirus
YYLWPLYYF

SEQ ID NO: 49133 - protein, 9 aa, Artificial Sequence
  Peptide Derived from Human Papillomavirus
LADKILQWS

SEQ ID NO: 49134 - protein, 9 aa, Artificial Sequence
  Peptide Derived from Human Papillomavirus
VGPTDPSIV

SEQ ID NO: 49135 - protein, 9 aa, Artificial Sequence
  Peptide Derived from Human Papillomavirus
LHRPALTSR

SEQ ID NO: 49136 - protein, 9 aa, Artificial Sequence
  Peptide Derived from Human Papillomavirus
WSSLGIFLG

SEQ ID NO: 49137 - protein, 9 aa, Artificial Sequence
  Peptide Derived from Human Papillomavirus
LIEDSSVVT

SEQ ID NO: 49138 - protein, 9 aa, Artificial Sequence
  Peptide Derived from Human Papillomavirus
IYADDMDPA

SEQ ID NO: 49139 - protein, 9 aa, Artificial Sequence
  Peptide Derived from Human Papillomavirus
FASSGTGEE

SEQ ID NO: 49140 - protein, 9 aa, Artificial Sequence
  Peptide Derived from Human Papillomavirus
LYYFIPKKR

SEQ ID NO: 49141 - protein, 9 aa, Artificial Sequence
  Peptide Derived from Human Papillomavirus
IRLHRPALT

SEQ ID NO: 49142 - protein, 9 aa, Artificial Sequence
  Peptide Derived from Human Papillomavirus
FEPVDTTLT

SEQ ID NO: 49143 - protein, 9 aa, Artificial Sequence
  Peptide Derived from Human Papillomavirus
FSDPSIIEV

SEQ ID NO: 49144 - protein, 9 aa, Artificial Sequence
  Peptide Derived from Human Papillomavirus
FLTRPSSLI

SEQ ID NO: 49145 - protein, 9 aa, Artificial Sequence
  Peptide Derived from Human Papillomavirus
VDVGPTRPP

SEQ ID NO: 49146 - protein, 9 aa, Artificial Sequence
  Peptide Derived from Human Papillomavirus
VGTPTSGTH

SEQ ID NO: 49147 - protein, 9 aa, Artificial Sequence
  Peptide Derived from Human Papillomavirus
VPLTSSWDV

SEQ ID NO: 49148 - protein, 9 aa, Artificial Sequence
  Peptide Derived from Human Papillomavirus
LDITPSSTS

SEQ ID NO: 49149 - protein, 9 aa, Artificial Sequence
  Peptide Derived from Human Papillomavirus
LTRPSSLIT

SEQ ID NO: 49150 - protein, 9 aa, Artificial Sequence
  Peptide Derived from Human Papillomavirus
IELQPLVSA

SEQ ID NO: 49151 - protein, 9 aa, Artificial Sequence
  Peptide Derived from Human Papillomavirus
IEVPQTGEV

SEQ ID NO: 49152 - protein, 9 aa, Artificial Sequence
  Peptide Derived from Human Papillomavirus
IEPVGPTDP

SEQ ID NO: 49153 - protein, 9 aa, Artificial Sequence
  Peptide Derived from Human Papillomavirus
VRFSRLGQR

SEQ ID NO: 49154 - protein, 9 aa, Artificial Sequence
  Peptide Derived from Human Papillomavirus
VPYFFADGF

SEQ ID NO: 49155 - protein, 9 aa, Artificial Sequence
  Peptide Derived from Human Papillomavirus
VVIEPVGPT

SEQ ID NO: 49156 - protein, 9 aa, Artificial Sequence
  Peptide Derived from Human Papillomavirus
FYHDISPIA

SEQ ID NO: 49157 - protein, 9 aa, Artificial Sequence
  Peptide Derived from Human Papillomavirus
MDIIRLHRP

SEQ ID NO: 49158 - protein, 9 aa, Artificial Sequence
  Peptide Derived from Human Papillomavirus
FFKYSPTIS

SEQ ID NO: 49159 - protein, 9 aa, Artificial Sequence
  Peptide Derived from Human Papillomavirus
IFLGGLGIG

SEQ ID NO: 49160 - protein, 9 aa, Artificial Sequence
  Peptide Derived from Human Papillomavirus
VVDVGPTRP

SEQ ID NO: 49161 - protein, 9 aa, Artificial Sequence
  Peptide Derived from Human Papillomavirus
YIELQPLVS

SEQ ID NO: 49162 - protein, 9 aa, Artificial Sequence
  Peptide Derived from Human Papillomavirus
ISSASSYSN

SEQ ID NO: 49163 - protein, 9 aa, Artificial Sequence
  Peptide Derived from Human Papillomavirus
YQQVSVANP

SEQ ID NO: 49164 - protein, 9 aa, Artificial Sequence
  Peptide Derived from Human Papillomavirus
ITYDNPAFE

SEQ ID NO: 49165 - protein, 9 aa, Artificial Sequence
  Peptide Derived from Human Papillomavirus
VTSGAPRPT

SEQ ID NO: 49166 - protein, 9 aa, Artificial Sequence
  Peptide Derived from Human Papillomavirus
VSISTTNFT

SEQ ID NO: 49167 - protein, 9 aa, Artificial Sequence
  Peptide Derived from Human Papillomavirus
YEEIPLQTF

SEQ ID NO: 49168 - protein, 9 aa, Artificial Sequence
  Peptide Derived from Human Papillomavirus
VLDITPSST

SEQ ID NO: 49169 - protein, 9 aa, Artificial Sequence
  Peptide Derived from Human Papillomavirus
IGIHGTHYY

SEQ ID NO: 49170 - protein, 9 aa, Artificial Sequence
  Peptide Derived from Human Papillomavirus
FDITSAGTT

SEQ ID NO: 49171 - protein, 9 aa, Artificial Sequence
  Peptide Derived from Human Papillomavirus
WPIVSPTAP

SEQ ID NO: 49172 - protein, 9 aa, Artificial Sequence
  Peptide Derived from Human Papillomavirus
VWPIVSPTA

SEQ ID NO: 49173 - protein, 9 aa, Artificial Sequence
  Peptide Derived from Human Papillomavirus
YHDISPIAP

SEQ ID NO: 49174 - protein, 9 aa, Artificial Sequence
  Peptide Derived from Human Papillomavirus
ITPSSTSVS

SEQ ID NO: 49175 - protein, 9 aa, Artificial Sequence
  Peptide Derived from Human Papillomavirus
VEGTTLADK

SEQ ID NO: 49176 - protein, 9 aa, Artificial Sequence
  Peptide Derived from Human Papillomavirus
YTGPDITLP

SEQ ID NO: 49177 - protein, 9 aa, Artificial Sequence
  Peptide Derived from Human Papillomavirus
VAGPRLYSR

SEQ ID NO: 49178 - protein, 9 aa, Artificial Sequence
  Peptide Derived from Human Papillomavirus
IEDSSVVTS

SEQ ID NO: 49179 - protein, 9 aa, Artificial Sequence
  Peptide Derived from Human Papillomavirus
VGPTRPPVV

SEQ ID NO: 49180 - protein, 9 aa, Artificial Sequence
  Peptide Derived from Human Papillomavirus
IVSPTAPAS

SEQ ID NO: 49181 - protein, 9 aa, Artificial Sequence
  Peptide Derived from Human Papillomavirus
VSPTAPAST

SEQ ID NO: 49182 - protein, 9 aa, Artificial Sequence
  Peptide Derived from Human Papillomavirus
ISPIAPSPE

SEQ ID NO: 49183 - protein, 9 aa, Artificial Sequence
  Peptide Derived from Human Papillomavirus
LQPLVSATE

SEQ ID NO: 49184 - protein, 9 aa, Artificial Sequence
  Peptide Derived from Human Papillomavirus
VSVANPEFL

SEQ ID NO: 49185 - protein, 9 aa, Artificial Sequence
  Peptide Derived from Human Papillomavirus
VTVPLTSSW

SEQ ID NO: 49186 - protein, 9 aa, Artificial Sequence
  Peptide Derived from Human Papillomavirus
LYWYRTGMS

SEQ ID NO: 49187 - protein, 9 aa, Artificial Sequence
  Peptide Derived from Human Papillomavirus
FLKSNSQAK

SEQ ID NO: 49188 - protein, 9 aa, Artificial Sequence
  Peptide Derived from Human Papillomavirus
WGMVMLMLV

SEQ ID NO: 49189 - protein, 9 aa, Artificial Sequence
  Peptide Derived from Human Papillomavirus
VTGTVAEGF

SEQ ID NO: 49190 - protein, 9 aa, Artificial Sequence
  Peptide Derived from Human Papillomavirus
VKDCGTMCR

SEQ ID NO: 49191 - protein, 9 aa, Artificial Sequence
  Peptide Derived from Human Papillomavirus
LFLKGVPKK

SEQ ID NO: 49192 - protein, 9 aa, Artificial Sequence
  Peptide Derived from Human Papillomavirus
WYRTGMSNI

SEQ ID NO: 49193 - protein, 9 aa, Artificial Sequence
  Peptide Derived from Human Papillomavirus
IQPPKLRST

SEQ ID NO: 49194 - protein, 9 aa, Artificial Sequence
  Peptide Derived from Human Papillomavirus
WFYVEAVID

SEQ ID NO: 49195 - protein, 9 aa, Artificial Sequence
  Peptide Derived from Human Papillomavirus
YIDNYLRNA

SEQ ID NO: 49196 - protein, 9 aa, Artificial Sequence
  Peptide Derived from Human Papillomavirus
WPYLHSRLV

SEQ ID NO: 49197 - protein, 9 aa, Artificial Sequence
  Peptide Derived from Human Papillomavirus
WKSFFSRTW

SEQ ID NO: 49198 - protein, 9 aa, Artificial Sequence
  Peptide Derived from Human Papillomavirus
IAYKYAQLA

SEQ ID NO: 49199 - protein, 9 aa, Artificial Sequence
  Peptide Derived from Human Papillomavirus
YGNTEVETQ

SEQ ID NO: 49200 - protein, 9 aa, Artificial Sequence
  Peptide Derived from Human Papillomavirus
FDLSQMVQW

SEQ ID NO: 49201 - protein, 9 aa, Artificial Sequence
  Peptide Derived from Human Papillomavirus
VAAFGVTGT

SEQ ID NO: 49202 - protein, 9 aa, Artificial Sequence
  Peptide Derived from Human Papillomavirus
YKYAQLADS

SEQ ID NO: 49203 - protein, 9 aa, Artificial Sequence
  Peptide Derived from Human Papillomavirus
LEKLLCIST

SEQ ID NO: 49204 - protein, 9 aa, Artificial Sequence
  Peptide Derived from Human Papillomavirus
VSGQNIRTL

SEQ ID NO: 49205 - protein, 9 aa, Artificial Sequence
  Peptide Derived from Human Papillomavirus
LLQPYCLYC

SEQ ID NO: 49206 - protein, 9 aa, Artificial Sequence
  Peptide Derived from Human Papillomavirus
ISYANSKSH

SEQ ID NO: 49207 - protein, 9 aa, Artificial Sequence
  Peptide Derived from Human Papillomavirus
FSTFKCVSG

SEQ ID NO: 49208 - protein, 9 aa, Artificial Sequence
  Peptide Derived from Human Papillomavirus
YFGMSLISF

SEQ ID NO: 49209 - protein, 9 aa, Artificial Sequence
  Peptide Derived from Human Papillomavirus
LSDISSCVD

SEQ ID NO: 49210 - protein, 9 aa, Artificial Sequence
  Peptide Derived from Human Papillomavirus
YVEAVIDRQ

SEQ ID NO: 49211 - protein, 9 aa, Artificial Sequence
  Peptide Derived from Human Papillomavirus
LMQLKCPPL

SEQ ID NO: 49212 - protein, 9 aa, Artificial Sequence
  Peptide Derived from Human Papillomavirus
YLRNALDGN

SEQ ID NO: 49213 - protein, 9 aa, Artificial Sequence
  Peptide Derived from Human Papillomavirus
VSFLSALKL

SEQ ID NO: 49214 - protein, 9 aa, Artificial Sequence
  Peptide Derived from Human Papillomavirus
LLEKLLCIS

SEQ ID NO: 49215 - protein, 9 aa, Artificial Sequence
  Peptide Derived from Human Papillomavirus
LDDATTPCW

SEQ ID NO: 49216 - protein, 9 aa, Artificial Sequence
  Peptide Derived from Human Papillomavirus
YANSKSHFW

SEQ ID NO: 49217 - protein, 9 aa, Artificial Sequence
  Peptide Derived from Human Papillomavirus
FQSNKSTCT

SEQ ID NO: 49218 - protein, 9 aa, Artificial Sequence
  Peptide Derived from Human Papillomavirus
VYGETPEWI

SEQ ID NO: 49219 - protein, 9 aa, Artificial Sequence
  Peptide Derived from Human Papillomavirus
LQGCIISYA

SEQ ID NO: 49220 - protein, 9 aa, Artificial Sequence
  Peptide Derived from Human Papillomavirus
MQLKCPPLL

SEQ ID NO: 49221 - protein, 9 aa, Artificial Sequence
  Peptide Derived from Human Papillomavirus
YGVSFMELI

SEQ ID NO: 49222 - protein, 9 aa, Artificial Sequence
  Peptide Derived from Human Papillomavirus
MLDDATTPC

SEQ ID NO: 49223 - protein, 9 aa, Artificial Sequence
  Peptide Derived from Human Papillomavirus
ILIHGAPNT

SEQ ID NO: 49224 - protein, 9 aa, Artificial Sequence
  Peptide Derived from Human Papillomavirus
ITIEKLLEK

SEQ ID NO: 49225 - protein, 9 aa, Artificial Sequence
  Peptide Derived from Human Papillomavirus
YVGSPLSDI

SEQ ID NO: 49226 - protein, 9 aa, Artificial Sequence
  Peptide Derived from Human Papillomavirus
FSRTWCRLN

SEQ ID NO: 49227 - protein, 9 aa, Artificial Sequence
  Peptide Derived from Human Papillomavirus
FWLQPLADA

SEQ ID NO: 49228 - protein, 9 aa, Artificial Sequence
  Peptide Derived from Human Papillomavirus
FGMSLISFL

SEQ ID NO: 49229 - protein, 9 aa, Artificial Sequence
  Peptide Derived from Human Papillomavirus
LQPYCLYCH

SEQ ID NO: 49230 - protein, 9 aa, Artificial Sequence
  Peptide Derived from Human Papillomavirus
LLCISTNCM

SEQ ID NO: 49231 - protein, 9 aa, Artificial Sequence
  Peptide Derived from Human Papillomavirus
FLQGCIISY

SEQ ID NO: 49232 - protein, 9 aa, Artificial Sequence
  Peptide Derived from Human Papillomavirus
VPKKNCILI

SEQ ID NO: 49233 - protein, 9 aa, Artificial Sequence
  Peptide Derived from Human Papillomavirus
FLKGVPKKN

SEQ ID NO: 49234 - protein, 9 aa, Artificial Sequence
  Peptide Derived from Human Papillomavirus
ISTNCMLIQ

SEQ ID NO: 49235 - protein, 9 aa, Artificial Sequence
  Peptide Derived from Human Papillomavirus
VRFKCAKNR

SEQ ID NO: 49236 - protein, 9 aa, Artificial Sequence
  Peptide Derived from Human Papillomavirus
LKCPPLLIT

SEQ ID NO: 49237 - protein, 9 aa, Artificial Sequence
  Peptide Derived from Human Papillomavirus
LADAKIGML

SEQ ID NO: 49238 - protein, 9 aa, Artificial Sequence
  Peptide Derived from Human Papillomavirus
FTFPNPFPF

SEQ ID NO: 49239 - protein, 9 aa, Artificial Sequence
  Peptide Derived from Human Papillomavirus
VSFMELIRP

SEQ ID NO: 49240 - protein, 9 aa, Artificial Sequence
  Peptide Derived from Human Papillomavirus
YRTGMSNIS

SEQ ID NO: 49241 - protein, 9 aa, Artificial Sequence
  Peptide Derived from Human Papillomavirus
IRPFQSNKS

SEQ ID NO: 49242 - protein, 9 aa, Artificial Sequence
  Peptide Derived from Human Papillomavirus
WIKSRCDKV

SEQ ID NO: 49243 - protein, 9 aa, Artificial Sequence
  Peptide Derived from Human Papillomavirus
LVRFKCAKN

SEQ ID NO: 49244 - protein, 9 aa, Artificial Sequence
  Peptide Derived from Human Papillomavirus
VEEQQTTLS

SEQ ID NO: 49245 - protein, 9 aa, Artificial Sequence
  Peptide Derived from Human Papillomavirus
LIHGAPNTG

SEQ ID NO: 49246 - protein, 9 aa, Artificial Sequence
  Peptide Derived from Human Papillomavirus
VYNNQAEAE

SEQ ID NO: 49247 - protein, 9 aa, Artificial Sequence
  Peptide Derived from Human Papillomavirus
MDDSEIAYK

SEQ ID NO: 49248 - protein, 9 aa, Artificial Sequence
  Peptide Derived from Human Papillomavirus
FYVEAVIDR

SEQ ID NO: 49249 - protein, 9 aa, Artificial Sequence
  Peptide Derived from Human Papillomavirus
VETQQMVQV

SEQ ID NO: 49250 - protein, 9 aa, Artificial Sequence
  Peptide Derived from Human Papillomavirus
IERQTVLQH

SEQ ID NO: 49251 - protein, 9 aa, Artificial Sequence
  Peptide Derived from Human Papillomavirus
LRSTAAALY

SEQ ID NO: 49252 - protein, 9 aa, Artificial Sequence
  Peptide Derived from Human Papillomavirus
LITSNINAG

SEQ ID NO: 49253 - protein, 9 aa, Artificial Sequence
  Peptide Derived from Human Papillomavirus
FHAQEAEEH

SEQ ID NO: 49254 - protein, 9 aa, Artificial Sequence
  Peptide Derived from Human Papillomavirus
FVSFLSALK

SEQ ID NO: 49255 - protein, 9 aa, Artificial Sequence
  Peptide Derived from Human Papillomavirus
LSCNGSDGT

SEQ ID NO: 49256 - protein, 9 aa, Artificial Sequence
  Peptide Derived from Human Papillomavirus
YDNDVMDDS

SEQ ID NO: 49257 - protein, 9 aa, Artificial Sequence
  Peptide Derived from Human Papillomavirus
VGSPLSDIS

SEQ ID NO: 49258 - protein, 9 aa, Artificial Sequence
  Peptide Derived from Human Papillomavirus
LDGNPVSID

SEQ ID NO: 49259 - protein, 9 aa, Artificial Sequence
  Peptide Derived from Human Papillomavirus
LQVLKTSNG

SEQ ID NO: 49260 - protein, 9 aa, Artificial Sequence
  Peptide Derived from Human Papillomavirus
FELPDSGYG

SEQ ID NO: 49261 - protein, 9 aa, Artificial Sequence
  Peptide Derived from Human Papillomavirus
YLHSRLVVF

SEQ ID NO: 49262 - protein, 9 aa, Artificial Sequence
  Peptide Derived from Human Papillomavirus
WLQPLADAK

SEQ ID NO: 49263 - protein, 9 aa, Artificial Sequence
  Peptide Derived from Human Papillomavirus
VKHKALMQL

SEQ ID NO: 49264 - protein, 9 aa, Artificial Sequence
  Peptide Derived from Human Papillomavirus
LKAICIENN

SEQ ID NO: 49265 - protein, 9 aa, Artificial Sequence
  Peptide Derived from Human Papillomavirus
VVFTFPNPF

SEQ ID NO: 49266 - protein, 9 aa, Artificial Sequence
  Peptide Derived from Human Papillomavirus
WCRLNLHEE

SEQ ID NO: 49267 - protein, 9 aa, Artificial Sequence
  Peptide Derived from Human Papillomavirus
VDYNISPRL

SEQ ID NO: 49268 - protein, 9 aa, Artificial Sequence
  Peptide Derived from Human Papillomavirus
MVMLMLVRF

SEQ ID NO: 49269 - protein, 9 aa, Artificial Sequence
  Peptide Derived from Human Papillomavirus
MLIQPPKLR

SEQ ID NO: 49270 - protein, 9 aa, Artificial Sequence
  Peptide Derived from Human Papillomavirus
WIERQTVLQ

SEQ ID NO: 49271 - protein, 9 aa, Artificial Sequence
  Peptide Derived from Human Papillomavirus
FGVTGTVAE

SEQ ID NO: 49272 - protein, 9 aa, Artificial Sequence
  Peptide Derived from Human Papillomavirus
IDNCNVYNN

SEQ ID NO: 49273 - protein, 9 aa, Artificial Sequence
  Peptide Derived from Human Papillomavirus
VIDRQTGDN

SEQ ID NO: 49274 - protein, 9 aa, Artificial Sequence
  Peptide Derived from Human Papillomavirus
FPNPFPFDK

SEQ ID NO: 49275 - protein, 9 aa, Artificial Sequence
  Peptide Derived from Human Papillomavirus
LRYQQIEFV

SEQ ID NO: 49276 - protein, 9 aa, Artificial Sequence
  Peptide Derived from Human Papillomavirus
LKRKYVGSP

SEQ ID NO: 49277 - protein, 9 aa, Artificial Sequence
  Peptide Derived from Human Papillomavirus
LSALKLFLK

SEQ ID NO: 49278 - protein, 9 aa, Artificial Sequence
  Peptide Derived from Human Papillomavirus
MELIRPFQS

SEQ ID NO: 49279 - protein, 9 aa, Artificial Sequence
  Peptide Derived from Human Papillomavirus
VMLMLVRFK

SEQ ID NO: 49280 - protein, 9 aa, Artificial Sequence
  Peptide Derived from Human Papillomavirus
LHSRLVVFT

SEQ ID NO: 49281 - protein, 9 aa, Artificial Sequence
  Peptide Derived from Human Papillomavirus
LADSDSNAC

SEQ ID NO: 49282 - protein, 9 aa, Artificial Sequence
  Peptide Derived from Human Papillomavirus
LQSLACSWG

SEQ ID NO: 49283 - protein, 9 aa, Artificial Sequence
  Peptide Derived from Human Papillomavirus
YCHLQSLAC

SEQ ID NO: 49284 - protein, 9 aa, Artificial Sequence
  Peptide Derived from Human Papillomavirus
VTKLPTANN

SEQ ID NO: 49285 - protein, 9 aa, Artificial Sequence
  Peptide Derived from Human Papillomavirus
LQAIELQMM

SEQ ID NO: 49286 - protein, 9 aa, Artificial Sequence
  Peptide Derived from Human Papillomavirus
VSKAKALQA

SEQ ID NO: 49287 - protein, 9 aa, Artificial Sequence
  Peptide Derived from Human Papillomavirus
MGIHSINHQ

SEQ ID NO: 49288 - protein, 9 aa, Artificial Sequence
  Peptide Derived from Human Papillomavirus
ISAAACTNQ

SEQ ID NO: 49289 - protein, 9 aa, Artificial Sequence
  Peptide Derived from Human Papillomavirus
LNTVKIPNT

SEQ ID NO: 49290 - protein, 9 aa, Artificial Sequence
  Peptide Derived from Human Papillomavirus
MQQTSLELY

SEQ ID NO: 49291 - protein, 9 aa, Artificial Sequence
  Peptide Derived from Human Papillomavirus
VNCKGIYYV

SEQ ID NO: 49292 - protein, 9 aa, Artificial Sequence
  Peptide Derived from Human Papillomavirus
FAGIVTKLP

SEQ ID NO: 49293 - protein, 9 aa, Artificial Sequence
  Peptide Derived from Human Papillomavirus
MMLETLNNT

SEQ ID NO: 49294 - protein, 9 aa, Artificial Sequence
  Peptide Derived from Human Papillomavirus
FSSDEISFA

SEQ ID NO: 49295 - protein, 9 aa, Artificial Sequence
  Peptide Derived from Human Papillomavirus
IVTKLPTAN

SEQ ID NO: 49296 - protein, 9 aa, Artificial Sequence
  Peptide Derived from Human Papillomavirus
VDSVNCGVI

SEQ ID NO: 49297 - protein, 9 aa, Artificial Sequence
  Peptide Derived from Human Papillomavirus
IVFPESVFS

SEQ ID NO: 49298 - protein, 9 aa, Artificial Sequence
  Peptide Derived from Human Papillomavirus
LECVLMYKA

SEQ ID NO: 49299 - protein, 9 aa, Artificial Sequence
  Peptide Derived from Human Papillomavirus
YFVNFTEEA

SEQ ID NO: 49300 - protein, 9 aa, Artificial Sequence
  Peptide Derived from Human Papillomavirus
VPALSVSKA

SEQ ID NO: 49301 - protein, 9 aa, Artificial Sequence
  Peptide Derived from Human Papillomavirus
WKHIRLECV

SEQ ID NO: 49302 - protein, 9 aa, Artificial Sequence
  Peptide Derived from Human Papillomavirus
INHQVVPAL

SEQ ID NO: 49303 - protein, 9 aa, Artificial Sequence
  Peptide Derived from Human Papillomavirus
LTYISTSQR

SEQ ID NO: 49304 - protein, 9 aa, Artificial Sequence
  Peptide Derived from Human Papillomavirus
VHEGHITYF

SEQ ID NO: 49305 - protein, 9 aa, Artificial Sequence
  Peptide Derived from Human Papillomavirus
YEQVSSTWH

SEQ ID NO: 49306 - protein, 9 aa, Artificial Sequence
  Peptide Derived from Human Papillomavirus
VLMYKAREM

SEQ ID NO: 49307 - protein, 9 aa, Artificial Sequence
  Peptide Derived from Human Papillomavirus
YLTAPTGCL

SEQ ID NO: 49308 - protein, 9 aa, Artificial Sequence
  Peptide Derived from Human Papillomavirus
LRYRLSKYK

SEQ ID NO: 49309 - protein, 9 aa, Artificial Sequence
  Peptide Derived from Human Papillomavirus
VKIPNTVSV

SEQ ID NO: 49310 - protein, 9 aa, Artificial Sequence
  Peptide Derived from Human Papillomavirus
IELQMMLET

SEQ ID NO: 49311 - protein, 9 aa, Artificial Sequence
  Peptide Derived from Human Papillomavirus
VTLTYISTS

SEQ ID NO: 49312 - protein, 9 aa, Artificial Sequence
  Peptide Derived from Human Papillomavirus
VISAAACTN

SEQ ID NO: 49313 - protein, 9 aa, Artificial Sequence
  Peptide Derived from Human Papillomavirus
WTMQQTSLE

SEQ ID NO: 49314 - protein, 9 aa, Artificial Sequence
  Peptide Derived from Human Papillomavirus
VVPALSVSK

SEQ ID NO: 49315 - protein, 9 aa, Artificial Sequence
  Peptide Derived from Human Papillomavirus
LRGDSVDSV

SEQ ID NO: 49316 - protein, 9 aa, Artificial Sequence
  Peptide Derived from Human Papillomavirus
FIYLCIDGQ

SEQ ID NO: 49317 - protein, 9 aa, Artificial Sequence
  Peptide Derived from Human Papillomavirus
LLRGDSVDS

SEQ ID NO: 49318 - protein, 9 aa, Artificial Sequence
  Peptide Derived from Human Papillomavirus
VVEGQVNCK

SEQ ID NO: 49319 - protein, 9 aa, Artificial Sequence
  Peptide Derived from Human Papillomavirus
LELYLTAPT

SEQ ID NO: 49320 - protein, 9 aa, Artificial Sequence
  Peptide Derived from Human Papillomavirus
VFPESVFSS

SEQ ID NO: 49321 - protein, 9 aa, Artificial Sequence
  Peptide Derived from Human Papillomavirus
VCQDKILEH

SEQ ID NO: 49322 - protein, 9 aa, Artificial Sequence
  Peptide Derived from Human Papillomavirus
ISFAGIVTK

SEQ ID NO: 49323 - protein, 9 aa, Artificial Sequence
  Peptide Derived from Human Papillomavirus
VRRATTSTK

SEQ ID NO: 49324 - protein, 9 aa, Artificial Sequence
  Peptide Derived from Human Papillomavirus
LYLTAPTGC

SEQ ID NO: 49325 - protein, 9 aa, Artificial Sequence
  Peptide Derived from Human Papillomavirus
WHWTCTDGK

SEQ ID NO: 49326 - protein, 9 aa, Artificial Sequence
  Peptide Derived from Human Papillomavirus
VSCPATTPI

SEQ ID NO: 49327 - protein, 9 aa, Artificial Sequence
  Peptide Derived from Human Papillomavirus
IPNTVSVST

SEQ ID NO: 49328 - protein, 9 aa, Artificial Sequence
  Peptide Derived from Human Papillomavirus
VNCGVISAA

SEQ ID NO: 49329 - protein, 9 aa, Artificial Sequence
  Peptide Derived from Human Papillomavirus
YKAREMGIH

SEQ ID NO: 49330 - protein, 9 aa, Artificial Sequence
  Peptide Derived from Human Papillomavirus
LSVSKAKAL

SEQ ID NO: 49331 - protein, 9 aa, Artificial Sequence
  Peptide Derived from Human Papillomavirus
IRLECVLMY

SEQ ID NO: 49332 - protein, 9 aa, Artificial Sequence
  Peptide Derived from Human Papillomavirus
LYEQVSSTW

SEQ ID NO: 49333 - protein, 9 aa, Artificial Sequence
  Peptide Derived from Human Papillomavirus
IDGQCTVVE

SEQ ID NO: 49334 - protein, 9 aa, Artificial Sequence
  Peptide Derived from Human Papillomavirus
WKFIYLCID

SEQ ID NO: 49335 - protein, 9 aa, Artificial Sequence
  Peptide Derived from Human Papillomavirus
MIELNISTV

SEQ ID NO: 49336 - protein, 9 aa, Artificial Sequence
  Peptide Derived from Human Papillomavirus
IELNISTVS

SEQ ID NO: 49337 - protein, 9 aa, Artificial Sequence
  Peptide Derived from Human Papillomavirus
LLLIVILWV

SEQ ID NO: 49338 - protein, 9 aa, Artificial Sequence
  Peptide Derived from Human Papillomavirus
IYVVFIYIP

SEQ ID NO: 49339 - protein, 9 aa, Artificial Sequence
  Peptide Derived from Human Papillomavirus
VLLFVCLVI

SEQ ID NO: 49340 - protein, 9 aa, Artificial Sequence
  Peptide Derived from Human Papillomavirus
LCFCVLLFV

SEQ ID NO: 49341 - protein, 9 aa, Artificial Sequence
  Peptide Derived from Human Papillomavirus
VVFIYIPLF

SEQ ID NO: 49342 - protein, 9 aa, Artificial Sequence
  Peptide Derived from Human Papillomavirus
IRPLVLSVS

SEQ ID NO: 49343 - protein, 9 aa, Artificial Sequence
  Peptide Derived from Human Papillomavirus
LFVCLVIRP

SEQ ID NO: 49344 - protein, 9 aa, Artificial Sequence
  Peptide Derived from Human Papillomavirus
ISTVSIVLC

SEQ ID NO: 49345 - protein, 9 aa, Artificial Sequence
  Peptide Derived from Human Papillomavirus
LLFVCLVIR

SEQ ID NO: 49346 - protein, 9 aa, Artificial Sequence
  Peptide Derived from Human Papillomavirus
IPLFVIHTH

SEQ ID NO: 49347 - protein, 9 aa, Artificial Sequence
  Peptide Derived from Human Papillomavirus
LVIRPLVLS

SEQ ID NO: 49348 - protein, 9 aa, Artificial Sequence
  Peptide Derived from Human Papillomavirus
VIATSPLRC

SEQ ID NO: 49349 - protein, 9 aa, Artificial Sequence
  Peptide Derived from Human Papillomavirus
LVLSVSVYA

SEQ ID NO: 49350 - protein, 9 aa, Artificial Sequence
  Peptide Derived from Human Papillomavirus
VSIVLCFLL

SEQ ID NO: 49351 - protein, 9 aa, Artificial Sequence
  Peptide Derived from Human Papillomavirus
LWVIATSPL

SEQ ID NO: 49352 - protein, 9 aa, Artificial Sequence
  Peptide Derived from Human Papillomavirus
VFIYIPLFV

SEQ ID NO: 49353 - protein, 9 aa, Artificial Sequence
  Peptide Derived from Human Papillomavirus
LLCFCVLLF

SEQ ID NO: 49354 - protein, 9 aa, Artificial Sequence
  Peptide Derived from Human Papillomavirus
IHTHASFLS

SEQ ID NO: 49355 - protein, 9 aa, Artificial Sequence
  Peptide Derived from Human Papillomavirus
ILWVIATSP

SEQ ID NO: 49356 - protein, 9 aa, Artificial Sequence
  Peptide Derived from Human Papillomavirus
VILWVIATS

SEQ ID NO: 49357 - protein, 9 aa, Artificial Sequence
  Peptide Derived from Human Papillomavirus
IVILWVIAT

SEQ ID NO: 49358 - protein, 9 aa, Artificial Sequence
  Peptide Derived from Human Papillomavirus
FCIYVVFIY

SEQ ID NO: 49359 - protein, 9 aa, Artificial Sequence
  Peptide Derived from Human Papillomavirus
IATSPLRCF

SEQ ID NO: 49360 - protein, 9 aa, Artificial Sequence
  Peptide Derived from Human Papillomavirus
LNISTVSIV

SEQ ID NO: 49361 - protein, 9 aa, Artificial Sequence
  Peptide Derived from Human Papillomavirus
VIHTHASFL

SEQ ID NO: 49362 - protein, 9 aa, Artificial Sequence
  Peptide Derived from Human Papillomavirus
VLSVSVYAT

SEQ ID NO: 49363 - protein, 9 aa, Artificial Sequence
  Peptide Derived from Human Papillomavirus
LCFLLCFCV

SEQ ID NO: 49364 - protein, 9 aa, Artificial Sequence
  Peptide Derived from Human Papillomavirus
VYATLLLLI

SEQ ID NO: 49365 - protein, 9 aa, Artificial Sequence
  Peptide Derived from Human Papillomavirus
LLIVILWVI

SEQ ID NO: 49366 - protein, 9 aa, Artificial Sequence
  Peptide Derived from Human Papillomavirus
LRCFCIYVV

SEQ ID NO: 49367 - protein, 9 aa, Artificial Sequence
  Peptide Derived from Human Papillomavirus
IVLCFLLCF

SEQ ID NO: 49368 - protein, 9 aa, Artificial Sequence
  Peptide Derived from Human Papillomavirus
VIRPLVLSV

SEQ ID NO: 49369 - protein, 9 aa, Artificial Sequence
  Peptide Derived from Human Papillomavirus
YIPLFVIHT

SEQ ID NO: 49370 - protein, 9 aa, Artificial Sequence
  Peptide Derived from Human Papillomavirus
WVIATSPLR

SEQ ID NO: 49371 - protein, 9 aa, Artificial Sequence
  Peptide Derived from Human Papillomavirus
FLLCFCVLL

SEQ ID NO: 49372 - protein, 9 aa, Artificial Sequence
  Peptide Derived from Human Papillomavirus
FVCLVIRPL

SEQ ID NO: 49373 - protein, 9 aa, Artificial Sequence
  Peptide Derived from Human Papillomavirus
VSVYATLLL

SEQ ID NO: 49374 - protein, 9 aa, Artificial Sequence
  Peptide Derived from Human Papillomavirus
VLCFLLCFC

SEQ ID NO: 49375 - protein, 9 aa, Artificial Sequence
  Peptide Derived from Human Papillomavirus
YATLLLLIV

SEQ ID NO: 49376 - protein, 9 aa, Artificial Sequence
  Peptide Derived from Human Papillomavirus
LLLLIVILW

SEQ ID NO: 49377 - protein, 9 aa, Artificial Sequence
  Peptide Derived from Human Papillomavirus
LFVIHTHAS

SEQ ID NO: 49378 - protein, 9 aa, Artificial Sequence
  Peptide Derived from Human Papillomavirus
FIYIPLFVI

SEQ ID NO: 49379 - protein, 9 aa, Artificial Sequence
  Peptide Derived from Human Papillomavirus
MFKNPAERP

SEQ ID NO: 49380 - protein, 9 aa, Artificial Sequence
  Peptide Derived from Human Papillomavirus
IPYDELRLN

SEQ ID NO: 49381 - protein, 9 aa, Artificial Sequence
  Peptide Derived from Human Papillomavirus
LIRCITCQR

SEQ ID NO: 49382 - protein, 9 aa, Artificial Sequence
  Peptide Derived from Human Papillomavirus
FYSKVSEFR

SEQ ID NO: 49383 - protein, 9 aa, Artificial Sequence
  Peptide Derived from Human Papillomavirus
FTDLTIVYR

SEQ ID NO: 49384 - protein, 9 aa, Artificial Sequence
  Peptide Derived from Human Papillomavirus
IRCITCQRP

SEQ ID NO: 49385 - protein, 9 aa, Artificial Sequence
  Peptide Derived from Human Papillomavirus
WYRYSVYGT

SEQ ID NO: 49386 - protein, 9 aa, Artificial Sequence
  Peptide Derived from Human Papillomavirus
YDELRLNCV

SEQ ID NO: 49387 - protein, 9 aa, Artificial Sequence
  Peptide Derived from Human Papillomavirus
LNCVYCKGQ

SEQ ID NO: 49388 - protein, 9 aa, Artificial Sequence
  Peptide Derived from Human Papillomavirus
IGGRWTGRC

SEQ ID NO: 49389 - protein, 9 aa, Artificial Sequence
  Peptide Derived from Human Papillomavirus
WTGRCIACW

SEQ ID NO: 49390 - protein, 9 aa, Artificial Sequence
  Peptide Derived from Human Papillomavirus
WRRPRTETQ

SEQ ID NO: 49391 - protein, 9 aa, Artificial Sequence
  Peptide Derived from Human Papillomavirus
LLIRCITCQ

SEQ ID NO: 49392 - protein, 9 aa, Artificial Sequence
  Peptide Derived from Human Papillomavirus
ITCQRPLCP

SEQ ID NO: 49393 - protein, 9 aa, Artificial Sequence
  Peptide Derived from Human Papillomavirus
LTETEVLDF

SEQ ID NO: 49394 - protein, 9 aa, Artificial Sequence
  Peptide Derived from Human Papillomavirus
LTNKGICDL

SEQ ID NO: 49395 - protein, 9 aa, Artificial Sequence
  Peptide Derived from Human Papillomavirus
VYRDDTPHG

SEQ ID NO: 49396 - protein, 9 aa, Artificial Sequence
  Peptide Derived from Human Papillomavirus
YCKGQLTET

SEQ ID NO: 49397 - protein, 9 aa, Artificial Sequence
  Peptide Derived from Human Papillomavirus
ICDLLIRCI

SEQ ID NO: 49398 - protein, 9 aa, Artificial Sequence
  Peptide Derived from Human Papillomavirus
VCTKCLRFY

SEQ ID NO: 49399 - protein, 9 aa, Artificial Sequence
  Peptide Derived from Human Papillomavirus
LHELSSALE

SEQ ID NO: 49400 - protein, 9 aa, Artificial Sequence
  Peptide Derived from Human Papillomavirus
VYGTTLEKL

SEQ ID NO: 49401 - protein, 9 aa, Artificial Sequence
  Peptide Derived from Human Papillomavirus
LDFAFTDLT

SEQ ID NO: 49402 - protein, 9 aa, Artificial Sequence
  Peptide Derived from Human Papillomavirus
YRDDTPHGV

SEQ ID NO: 49403 - protein, 9 aa, Artificial Sequence
  Peptide Derived from Human Papillomavirus
FAFTDLTIV

SEQ ID NO: 49404 - protein, 9 aa, Artificial Sequence
  Peptide Derived from Human Papillomavirus
YSVYGTTLE

SEQ ID NO: 49405 - protein, 9 aa, Artificial Sequence
  Peptide Derived from Human Papillomavirus
LRLNCVYCK

SEQ ID NO: 49406 - protein, 9 aa, Artificial Sequence
  Peptide Derived from Human Papillomavirus
MRGETPTLQ

SEQ ID NO: 49407 - protein, 9 aa, Artificial Sequence
  Peptide Derived from Human Papillomavirus
ILQELLMGS

SEQ ID NO: 49408 - protein, 9 aa, Artificial Sequence
  Peptide Derived from Human Papillomavirus
VIDSPAGQA

SEQ ID NO: 49409 - protein, 9 aa, Artificial Sequence
  Peptide Derived from Human Papillomavirus
MGSFGIVCP

SEQ ID NO: 49410 - protein, 9 aa, Artificial Sequence
  Peptide Derived from Human Papillomavirus
VCPNCSTRL

SEQ ID NO: 49411 - protein, 9 aa, Artificial Sequence
  Peptide Derived from Human Papillomavirus
LQELLMGSF

SEQ ID NO: 49412 - protein, 9 aa, Artificial Sequence
  Peptide Derived from Human Papillomavirus
FGIVCPNCS

SEQ ID NO: 49413 - protein, 9 aa, Artificial Sequence
  Peptide Derived from Human Papillomavirus
IVTFCCQCK

SEQ ID NO: 49414 - protein, 9 aa, Artificial Sequence
  Peptide Derived from Human Papillomavirus
VLDLQPEAT

SEQ ID NO: 49415 - protein, 9 aa, Artificial Sequence
  Peptide Derived from Human Papillomavirus
VQSTQVDIR

SEQ ID NO: 49416 - protein, 9 aa, Artificial Sequence
  Peptide Derived from Human Papillomavirus
IVCPNCSTR

SEQ ID NO: 49417 - protein, 9 aa, Artificial Sequence
  Peptide Derived from Human Papillomavirus
VDIRILQEL

SEQ ID NO: 49418 - protein, 9 aa, Artificial Sequence
  Peptide Derived from Human Papillomavirus
LCVQSTQVD

SEQ ID NO: 49419 - protein, 9 aa, Artificial Sequence
  Peptide Derived from Human Papillomavirus
LQDYVLDLQ

SEQ ID NO: 49420 - protein, 9 aa, Artificial Sequence
  Peptide Derived from Human Papillomavirus
LQPEATDLH

SEQ ID NO: 49421 - protein, 9 aa, Artificial Sequence
  Peptide Derived from Human Papillomavirus
MSLWRPSEA

SEQ ID NO: 49422 - protein, 9 aa, Artificial Sequence
  Peptide Derived from Human Papillomavirus
MTYIHSMNP

SEQ ID NO: 49423 - protein, 9 aa, Artificial Sequence
  Peptide Derived from Human Papillomavirus
LTVGHPYYS

SEQ ID NO: 49424 - protein, 9 aa, Artificial Sequence
  Peptide Derived from Human Papillomavirus
YLPPVPVSK

SEQ ID NO: 49425 - protein, 9 aa, Artificial Sequence
  Peptide Derived from Human Papillomavirus
IANSDTTFK

SEQ ID NO: 49426 - protein, 9 aa, Artificial Sequence
  Peptide Derived from Human Papillomavirus
MDYKQTQLC

SEQ ID NO: 49427 - protein, 9 aa, Artificial Sequence
  Peptide Derived from Human Papillomavirus
LELKNSVIQ

SEQ ID NO: 49428 - protein, 9 aa, Artificial Sequence
  Peptide Derived from Human Papillomavirus
VTRTNIYYH

SEQ ID NO: 49429 - protein, 9 aa, Artificial Sequence
  Peptide Derived from Human Papillomavirus
FIFQLCKIT

SEQ ID NO: 49430 - protein, 9 aa, Artificial Sequence
  Peptide Derived from Human Papillomavirus
IKGSGSTAT

SEQ ID NO: 49431 - protein, 9 aa, Artificial Sequence
  Peptide Derived from Human Papillomavirus
FYNPETQRL

SEQ ID NO: 49432 - protein, 9 aa, Artificial Sequence
  Peptide Derived from Human Papillomavirus
FGLTTPPSG

SEQ ID NO: 49433 - protein, 9 aa, Artificial Sequence
  Peptide Derived from Human Papillomavirus
FWEVNLKEK

SEQ ID NO: 49434 - protein, 9 aa, Artificial Sequence
  Peptide Derived from Human Papillomavirus
VYLPPVPVS

SEQ ID NO: 49435 - protein, 9 aa, Artificial Sequence
  Peptide Derived from Human Papillomavirus
YRFVTSQAI

SEQ ID NO: 49436 - protein, 9 aa, Artificial Sequence
  Peptide Derived from Human Papillomavirus
LKEKFSADL

SEQ ID NO: 49437 - protein, 9 aa, Artificial Sequence
  Peptide Derived from Human Papillomavirus
LRREQMFVR

SEQ ID NO: 49438 - protein, 9 aa, Artificial Sequence
  Peptide Derived from Human Papillomavirus
MDFTALQDT

SEQ ID NO: 49439 - protein, 9 aa, Artificial Sequence
  Peptide Derived from Human Papillomavirus
YVFWEVNLK

SEQ ID NO: 49440 - protein, 9 aa, Artificial Sequence
  Peptide Derived from Human Papillomavirus
LQDTKSNVP

SEQ ID NO: 49441 - protein, 9 aa, Artificial Sequence
  Peptide Derived from Human Papillomavirus
FDLQFIFQL

SEQ ID NO: 49442 - protein, 9 aa, Artificial Sequence
  Peptide Derived from Human Papillomavirus
WGKGSPCSN

SEQ ID NO: 49443 - protein, 9 aa, Artificial Sequence
  Peptide Derived from Human Papillomavirus
VGRGQPLGV

SEQ ID NO: 49444 - protein, 9 aa, Artificial Sequence
  Peptide Derived from Human Papillomavirus
YRVFRVRLP

SEQ ID NO: 49445 - protein, 9 aa, Artificial Sequence
  Peptide Derived from Human Papillomavirus
LFVTVVDTT

SEQ ID NO: 49446 - protein, 9 aa, Artificial Sequence
  Peptide Derived from Human Papillomavirus
LGVGISGHP

SEQ ID NO: 49447 - protein, 9 aa, Artificial Sequence
  Peptide Derived from Human Papillomavirus
ISGHPLLNK

SEQ ID NO: 49448 - protein, 9 aa, Artificial Sequence
  Peptide Derived from Human Papillomavirus
YSIPKSDNP

SEQ ID NO: 49449 - protein, 9 aa, Artificial Sequence
  Peptide Derived from Human Papillomavirus
LCKITLSAD

SEQ ID NO: 49450 - protein, 9 aa, Artificial Sequence
  Peptide Derived from Human Papillomavirus
MNPAILEDW

SEQ ID NO: 49451 - protein, 9 aa, Artificial Sequence
  Peptide Derived from Human Papillomavirus
LSADIMTYI

SEQ ID NO: 49452 - protein, 9 aa, Artificial Sequence
  Peptide Derived from Human Papillomavirus
VVPKVSGLQ

SEQ ID NO: 49453 - protein, 9 aa, Artificial Sequence
  Peptide Derived from Human Papillomavirus
VPLDICNSI

SEQ ID NO: 49454 - protein, 9 aa, Artificial Sequence
  Peptide Derived from Human Papillomavirus
LGCKPPIGE

SEQ ID NO: 49455 - protein, 9 aa, Artificial Sequence
  Peptide Derived from Human Papillomavirus
WNFGLTTPP

SEQ ID NO: 49456 - protein, 9 aa, Artificial Sequence
  Peptide Derived from Human Papillomavirus
VPVSKVVST

SEQ ID NO: 49457 - protein, 9 aa, Artificial Sequence
  Peptide Derived from Human Papillomavirus
WRPSEATVY

SEQ ID NO: 49458 - protein, 9 aa, Artificial Sequence
  Peptide Derived from Human Papillomavirus
IHSMNPAIL

SEQ ID NO: 49459 - protein, 9 aa, Artificial Sequence
  Peptide Derived from Human Papillomavirus
LTTPPSGSL

SEQ ID NO: 49460 - protein, 9 aa, Artificial Sequence
  Peptide Derived from Human Papillomavirus
YHAGSARLL

SEQ ID NO: 49461 - protein, 9 aa, Artificial Sequence
  Peptide Derived from Human Papillomavirus
YWMQRAQGH

SEQ ID NO: 49462 - protein, 9 aa, Artificial Sequence
  Peptide Derived from Human Papillomavirus
VCAAIANSD

SEQ ID NO: 49463 - protein, 9 aa, Artificial Sequence
  Peptide Derived from Human Papillomavirus
ITPGDCPPL

SEQ ID NO: 49464 - protein, 9 aa, Artificial Sequence
  Peptide Derived from Human Papillomavirus
YFPTPSGSM

SEQ ID NO: 49465 - protein, 9 aa, Artificial Sequence
  Peptide Derived from Human Papillomavirus
IQDGDMVDT

SEQ ID NO: 49466 - protein, 9 aa, Artificial Sequence
  Peptide Derived from Human Papillomavirus
LDICNSICK

SEQ ID NO: 49467 - protein, 9 aa, Artificial Sequence
  Peptide Derived from Human Papillomavirus
IVVPKVSGL

SEQ ID NO: 49468 - protein, 9 aa, Artificial Sequence
  Peptide Derived from Human Papillomavirus
ICNSICKYP

SEQ ID NO: 49469 - protein, 9 aa, Artificial Sequence
  Peptide Derived from Human Papillomavirus
LKNSVIQDG

SEQ ID NO: 49470 - protein, 9 aa, Artificial Sequence
  Peptide Derived from Human Papillomavirus
FGFPDTSFY

SEQ ID NO: 49471 - protein, 9 aa, Artificial Sequence
  Peptide Derived from Human Papillomavirus
LYIKGSGST

SEQ ID NO: 49472 - protein, 9 aa, Artificial Sequence
  Peptide Derived from Human Papillomavirus
VSKVVSTDE

SEQ ID NO: 49473 - protein, 9 aa, Artificial Sequence
  Peptide Derived from Human Papillomavirus
FQLCKITLS

SEQ ID NO: 49474 - protein, 9 aa, Artificial Sequence
  Peptide Derived from Human Papillomavirus
LGRKFLLQA

SEQ ID NO: 49475 - protein, 9 aa, Artificial Sequence
  Peptide Derived from Human Papillomavirus
LLGCKPPIG

SEQ ID NO: 49476 - protein, 9 aa, Artificial Sequence
  Peptide Derived from Human Papillomavirus
VTVVDTTRS

SEQ ID NO: 49477 - protein, 9 aa, Artificial Sequence
  Peptide Derived from Human Papillomavirus
LCLLGCKPP

SEQ ID NO: 49478 - protein, 9 aa, Artificial Sequence
  Peptide Derived from Human Papillomavirus
VFRVRLPDP

SEQ ID NO: 49479 - protein, 9 aa, Artificial Sequence
  Peptide Derived from Human Papillomavirus
FNRSGTVGE

SEQ ID NO: 49480 - protein, 9 aa, Artificial Sequence
  Peptide Derived from Human Papillomavirus
WACVGLEVG

SEQ ID NO: 49481 - protein, 9 aa, Artificial Sequence
  Peptide Derived from Human Papillomavirus
LDQFPLGRK

SEQ ID NO: 49482 - protein, 9 aa, Artificial Sequence
  Peptide Derived from Human Papillomavirus
MVTSDAQIF

SEQ ID NO: 49483 - protein, 9 aa, Artificial Sequence
  Peptide Derived from Human Papillomavirus
VGESVPTDL

SEQ ID NO: 49484 - protein, 9 aa, Artificial Sequence
  Peptide Derived from Human Papillomavirus
YKQTQLCLL

SEQ ID NO: 49485 - protein, 9 aa, Artificial Sequence
  Peptide Derived from Human Papillomavirus
ITCQKTAPQ

SEQ ID NO: 49486 - protein, 9 aa, Artificial Sequence
  Peptide Derived from Human Papillomavirus
MSVCAAIAN

SEQ ID NO: 49487 - protein, 9 aa, Artificial Sequence
  Peptide Derived from Human Papillomavirus
YYHAGSARL

SEQ ID NO: 49488 - protein, 9 aa, Artificial Sequence
  Peptide Derived from Human Papillomavirus
LVWACVGLE

SEQ ID NO: 49489 - protein, 9 aa, Artificial Sequence
  Peptide Derived from Human Papillomavirus
LPPVPVSKV

SEQ ID NO: 49490 - protein, 9 aa, Artificial Sequence
  Peptide Derived from Human Papillomavirus
FVTSQAITC

SEQ ID NO: 49491 - protein, 9 aa, Artificial Sequence
  Peptide Derived from Human Papillomavirus
VRLPDPNKF

SEQ ID NO: 49492 - protein, 9 aa, Artificial Sequence
  Peptide Derived from Human Papillomavirus
VDTTRSTNM

SEQ ID NO: 49493 - protein, 9 aa, Artificial Sequence
  Peptide Derived from Human Papillomavirus
YLKMVAEPY

SEQ ID NO: 49494 - protein, 9 aa, Artificial Sequence
  Peptide Derived from Human Papillomavirus
VTSQAITCQ

SEQ ID NO: 49495 - protein, 9 aa, Artificial Sequence
  Peptide Derived from Human Papillomavirus
FRVRLPDPN

SEQ ID NO: 49496 - protein, 9 aa, Artificial Sequence
  Peptide Derived from Human Papillomavirus
MRSKRSTKR

SEQ ID NO: 49497 - protein, 9 aa, Artificial Sequence
  Peptide Derived from Human Papillomavirus
ILRYGSMGV

SEQ ID NO: 49498 - protein, 9 aa, Artificial Sequence
  Peptide Derived from Human Papillomavirus
VDTPATHNV

SEQ ID NO: 49499 - protein, 9 aa, Artificial Sequence
  Peptide Derived from Human Papillomavirus
FLDIIALHR

SEQ ID NO: 49500 - protein, 9 aa, Artificial Sequence
  Peptide Derived from Human Papillomavirus
VLQPPTPAE

SEQ ID NO: 49501 - protein, 9 aa, Artificial Sequence
  Peptide Derived from Human Papillomavirus
LRYGSMGVF

SEQ ID NO: 49502 - protein, 9 aa, Artificial Sequence
  Peptide Derived from Human Papillomavirus
FTVDTPATH

SEQ ID NO: 49503 - protein, 9 aa, Artificial Sequence
  Peptide Derived from Human Papillomavirus
IEHAPTQVF

SEQ ID NO: 49504 - protein, 9 aa, Artificial Sequence
  Peptide Derived from Human Papillomavirus
IPIRPPVSI

SEQ ID NO: 49505 - protein, 9 aa, Artificial Sequence
  Peptide Derived from Human Papillomavirus
LYFSNTSHN

SEQ ID NO: 49506 - protein, 9 aa, Artificial Sequence
  Peptide Derived from Human Papillomavirus
MDTFIVSTN

SEQ ID NO: 49507 - protein, 9 aa, Artificial Sequence
  Peptide Derived from Human Papillomavirus
IVDVGAPAP

SEQ ID NO: 49508 - protein, 9 aa, Artificial Sequence
  Peptide Derived from Human Papillomavirus
YFSNTSHNI

SEQ ID NO: 49509 - protein, 9 aa, Artificial Sequence
  Peptide Derived from Human Papillomavirus
IEMQPLGAS

SEQ ID NO: 49510 - protein, 9 aa, Artificial Sequence
  Peptide Derived from Human Papillomavirus
FYLHPSYYM

SEQ ID NO: 49511 - protein, 9 aa, Artificial Sequence
  Peptide Derived from Human Papillomavirus
LLSSSSIST

SEQ ID NO: 49512 - protein, 9 aa, Artificial Sequence
  Peptide Derived from Human Papillomavirus
VPIEHAPTQ

SEQ ID NO: 49513 - protein, 9 aa, Artificial Sequence
  Peptide Derived from Human Papillomavirus
FGGLGIGSG

SEQ ID NO: 49514 - protein, 9 aa, Artificial Sequence
  Peptide Derived from Human Papillomavirus
LSSSSISTH

SEQ ID NO: 49515 - protein, 9 aa, Artificial Sequence
  Peptide Derived from Human Papillomavirus
IADQILRYG

SEQ ID NO: 49516 - protein, 9 aa, Artificial Sequence
  Peptide Derived from Human Papillomavirus
YDISSINPA

SEQ ID NO: 49517 - protein, 9 aa, Artificial Sequence
  Peptide Derived from Human Papillomavirus
VGPLDPSIV

SEQ ID NO: 49518 - protein, 9 aa, Artificial Sequence
  Peptide Derived from Human Papillomavirus
LHRPALTSR

SEQ ID NO: 49519 - protein, 9 aa, Artificial Sequence
  Peptide Derived from Human Papillomavirus
VTSVSTHEN

SEQ ID NO: 49520 - protein, 9 aa, Artificial Sequence
  Peptide Derived from Human Papillomavirus
YGSMGVFFG

SEQ ID NO: 49521 - protein, 9 aa, Artificial Sequence
  Peptide Derived from Human Papillomavirus
FSGPDVPIE

SEQ ID NO: 49522 - protein, 9 aa, Artificial Sequence
  Peptide Derived from Human Papillomavirus
IEHTTIADQ

SEQ ID NO: 49523 - protein, 9 aa, Artificial Sequence
  Peptide Derived from Human Papillomavirus
VGAPAPIPH

SEQ ID NO: 49524 - protein, 9 aa, Artificial Sequence
  Peptide Derived from Human Papillomavirus
ITYENPAYE

SEQ ID NO: 49525 - protein, 9 aa, Artificial Sequence
  Peptide Derived from Human Papillomavirus
IALHRPALT

SEQ ID NO: 49526 - protein, 9 aa, Artificial Sequence
  Peptide Derived from Human Papillomavirus
LGASATTTS

SEQ ID NO: 49527 - protein, 9 aa, Artificial Sequence
  Peptide Derived from Human Papillomavirus
LYDIYADTD

SEQ ID NO: 49528 - protein, 9 aa, Artificial Sequence
  Peptide Derived from Human Papillomavirus
ITSSTPIPG

SEQ ID NO: 49529 - protein, 9 aa, Artificial Sequence
  Peptide Derived from Human Papillomavirus
YETVNAEES

SEQ ID NO: 49530 - protein, 9 aa, Artificial Sequence
  Peptide Derived from Human Papillomavirus
FTDPSVLQP

SEQ ID NO: 49531 - protein, 9 aa, Artificial Sequence
  Peptide Derived from Human Papillomavirus
LDVTSVSTH

SEQ ID NO: 49532 - protein, 9 aa, Artificial Sequence
  Peptide Derived from Human Papillomavirus
IPHPPTTSG

SEQ ID NO: 49533 - protein, 9 aa, Artificial Sequence
  Peptide Derived from Human Papillomavirus
LDIIALHRP

SEQ ID NO: 49534 - protein, 9 aa, Artificial Sequence
  Peptide Derived from Human Papillomavirus
LAPTTPQVS

SEQ ID NO: 49535 - protein, 9 aa, Artificial Sequence
  Peptide Derived from Human Papillomavirus
VSEASIPIR

SEQ ID NO: 49536 - protein, 9 aa, Artificial Sequence
  Peptide Derived from Human Papillomavirus
LQPPTPAET

SEQ ID NO: 49537 - protein, 9 aa, Artificial Sequence
  Peptide Derived from Human Papillomavirus
VFPFPLAPT

SEQ ID NO: 49538 - protein, 9 aa, Artificial Sequence
  Peptide Derived from Human Papillomavirus
IDPVGPLDP

SEQ ID NO: 49539 - protein, 9 aa, Artificial Sequence
  Peptide Derived from Human Papillomavirus
VSYFFTDVS

SEQ ID NO: 49540 - protein, 9 aa, Artificial Sequence
  Peptide Derived from Human Papillomavirus
LYSKATQQV

SEQ ID NO: 49541 - protein, 9 aa, Artificial Sequence
  Peptide Derived from Human Papillomavirus
VRYSRLGNK

SEQ ID NO: 49542 - protein, 9 aa, Artificial Sequence
  Peptide Derived from Human Papillomavirus
VSIDPVGPL

SEQ ID NO: 49543 - protein, 9 aa, Artificial Sequence
  Peptide Derived from Human Papillomavirus
YVPLSTRPS

SEQ ID NO: 49544 - protein, 9 aa, Artificial Sequence
  Peptide Derived from Human Papillomavirus
YYYDISSIN

SEQ ID NO: 49545 - protein, 9 aa, Artificial Sequence
  Peptide Derived from Human Papillomavirus
YFFTDVSVA

SEQ ID NO: 49546 - protein, 9 aa, Artificial Sequence
  Peptide Derived from Human Papillomavirus
VPTNTTVPL

SEQ ID NO: 49547 - protein, 9 aa, Artificial Sequence
  Peptide Derived from Human Papillomavirus
LLLSSSSIS

SEQ ID NO: 49548 - protein, 9 aa, Artificial Sequence
  Peptide Derived from Human Papillomavirus
VDVGAPAPI

SEQ ID NO: 49549 - protein, 9 aa, Artificial Sequence
  Peptide Derived from Human Papillomavirus
MQPLGASAT

SEQ ID NO: 49550 - protein, 9 aa, Artificial Sequence
  Peptide Derived from Human Papillomavirus
IRPPVSIDP

SEQ ID NO: 49551 - protein, 9 aa, Artificial Sequence
  Peptide Derived from Human Papillomavirus
VFFGGLGIG

SEQ ID NO: 49552 - protein, 9 aa, Artificial Sequence
  Peptide Derived from Human Papillomavirus
VQSTSAVSA

SEQ ID NO: 49553 - protein, 9 aa, Artificial Sequence
  Peptide Derived from Human Papillomavirus
VSPSTAVQS

SEQ ID NO: 49554 - protein, 9 aa, Artificial Sequence
  Peptide Derived from Human Papillomavirus
YEEIPMDTF

SEQ ID NO: 49555 - protein, 9 aa, Artificial Sequence
  Peptide Derived from Human Papillomavirus
ILDVTSVST

SEQ ID NO: 49556 - protein, 9 aa, Artificial Sequence
  Peptide Derived from Human Papillomavirus
YQTCKAAGT

SEQ ID NO: 49557 - protein, 9 aa, Artificial Sequence
  Peptide Derived from Human Papillomavirus
VKVIDPTFL

SEQ ID NO: 49558 - protein, 9 aa, Artificial Sequence
  Peptide Derived from Human Papillomavirus
FPFPLAPTT

SEQ ID NO: 49559 - protein, 9 aa, Artificial Sequence
  Peptide Derived from Human Papillomavirus
VSAYVPTNT

SEQ ID NO: 49560 - protein, 9 aa, Artificial Sequence
  Peptide Derived from Human Papillomavirus
FDIATTADT

SEQ ID NO: 49561 - protein, 9 aa, Artificial Sequence
  Peptide Derived from Human Papillomavirus
FPLAPTTPQ

SEQ ID NO: 49562 - protein, 9 aa, Artificial Sequence
  Peptide Derived from Human Papillomavirus
LDPSIVSLV

SEQ ID NO: 49563 - protein, 9 aa, Artificial Sequence
  Peptide Derived from Human Papillomavirus
YYDISSINP

SEQ ID NO: 49564 - protein, 9 aa, Artificial Sequence
  Peptide Derived from Human Papillomavirus
IDPTFLSAP

SEQ ID NO: 49565 - protein, 9 aa, Artificial Sequence
  Peptide Derived from Human Papillomavirus
YVPTNTTVP

SEQ ID NO: 49566 - protein, 9 aa, Artificial Sequence
  Peptide Derived from Human Papillomavirus
VEESGIVDV

SEQ ID NO: 49567 - protein, 9 aa, Artificial Sequence
  Peptide Derived from Human Papillomavirus
FFTDVSVAA

SEQ ID NO: 49568 - protein, 9 aa, Artificial Sequence
  Peptide Derived from Human Papillomavirus
VNAEESLYF

SEQ ID NO: 49569 - protein, 9 aa, Artificial Sequence
  Peptide Derived from Human Papillomavirus
LGNKQTLRT

SEQ ID NO: 49570 - protein, 9 aa, Artificial Sequence
  Peptide Derived from Human Papillomavirus
LSTRPSTVS

SEQ ID NO: 49571 - protein, 9 aa, Artificial Sequence
  Peptide Derived from Human Papillomavirus
ISSINPAGE

SEQ ID NO: 49572 - protein, 9 aa, Artificial Sequence
  Peptide Derived from Human Papillomavirus
FLKSNSQAK

SEQ ID NO: 49573 - protein, 9 aa, Artificial Sequence
  Peptide Derived from Human Papillomavirus
VVDRAANPC

SEQ ID NO: 49574 - protein, 9 aa, Artificial Sequence
  Peptide Derived from Human Papillomavirus
VKDCGIMCR

SEQ ID NO: 49575 - protein, 9 aa, Artificial Sequence
  Peptide Derived from Human Papillomavirus
MSNLLSIPE

SEQ ID NO: 49576 - protein, 9 aa, Artificial Sequence
  Peptide Derived from Human Papillomavirus
WFRTAMSNI

SEQ ID NO: 49577 - protein, 9 aa, Artificial Sequence
  Peptide Derived from Human Papillomavirus
ISFMELVRP

SEQ ID NO: 49578 - protein, 9 aa, Artificial Sequence
  Peptide Derived from Human Papillomavirus
YWFRTAMSN

SEQ ID NO: 49579 - protein, 9 aa, Artificial Sequence
  Peptide Derived from Human Papillomavirus
VTLQEISNV

SEQ ID NO: 49580 - protein, 9 aa, Artificial Sequence
  Peptide Derived from Human Papillomavirus
IEPPKLRSQ

SEQ ID NO: 49581 - protein, 9 aa, Artificial Sequence
  Peptide Derived from Human Papillomavirus
WFEVEAVIE

SEQ ID NO: 49582 - protein, 9 aa, Artificial Sequence
  Peptide Derived from Human Papillomavirus
WKSFFSRTW

SEQ ID NO: 49583 - protein, 9 aa, Artificial Sequence
  Peptide Derived from Human Papillomavirus
YYYAQLADS

SEQ ID NO: 49584 - protein, 9 aa, Artificial Sequence
  Peptide Derived from Human Papillomavirus
FDLSEMVQW

SEQ ID NO: 49585 - protein, 9 aa, Artificial Sequence
  Peptide Derived from Human Papillomavirus
IIILLLIRF

SEQ ID NO: 49586 - protein, 9 aa, Artificial Sequence
  Peptide Derived from Human Papillomavirus
IAYYYAQLA

SEQ ID NO: 49587 - protein, 9 aa, Artificial Sequence
  Peptide Derived from Human Papillomavirus
YGNTEVETQ

SEQ ID NO: 49588 - protein, 9 aa, Artificial Sequence
  Peptide Derived from Human Papillomavirus
WPYLHSRLT

SEQ ID NO: 49589 - protein, 9 aa, Artificial Sequence
  Peptide Derived from Human Papillomavirus
LNDLESSGV

SEQ ID NO: 49590 - protein, 9 aa, Artificial Sequence
  Peptide Derived from Human Papillomavirus
ITGYGISPS

SEQ ID NO: 49591 - protein, 9 aa, Artificial Sequence
  Peptide Derived from Human Papillomavirus
YRKRKIDEL

SEQ ID NO: 49592 - protein, 9 aa, Artificial Sequence
  Peptide Derived from Human Papillomavirus
LNAVCALKR

SEQ ID NO: 49593 - protein, 9 aa, Artificial Sequence
  Peptide Derived from Human Papillomavirus
MVIEPPKLR

SEQ ID NO: 49594 - protein, 9 aa, Artificial Sequence
  Peptide Derived from Human Papillomavirus
FLKGIPKKS

SEQ ID NO: 49595 - protein, 9 aa, Artificial Sequence
  Peptide Derived from Human Papillomavirus
ISCVNSKSH

SEQ ID NO: 49596 - protein, 9 aa, Artificial Sequence
  Peptide Derived from Human Papillomavirus
ISTFKCSAG

SEQ ID NO: 49597 - protein, 9 aa, Artificial Sequence
  Peptide Derived from Human Papillomavirus
YFGMSLIQF

SEQ ID NO: 49598 - protein, 9 aa, Artificial Sequence
  Peptide Derived from Human Papillomavirus
ISPSVAESL

SEQ ID NO: 49599 - protein, 9 aa, Artificial Sequence
  Peptide Derived from Human Papillomavirus
LVQLKCPPL

SEQ ID NO: 49600 - protein, 9 aa, Artificial Sequence
  Peptide Derived from Human Papillomavirus
YTHLQCLTC

SEQ ID NO: 49601 - protein, 9 aa, Artificial Sequence
  Peptide Derived from Human Papillomavirus
YYAQLADSN

SEQ ID NO: 49602 - protein, 9 aa, Artificial Sequence
  Peptide Derived from Human Papillomavirus
YMRNALDGN

SEQ ID NO: 49603 - protein, 9 aa, Artificial Sequence
  Peptide Derived from Human Papillomavirus
IDDVTPISW

SEQ ID NO: 49604 - protein, 9 aa, Artificial Sequence
  Peptide Derived from Human Papillomavirus
WIQSRCEKT

SEQ ID NO: 49605 - protein, 9 aa, Artificial Sequence
  Peptide Derived from Human Papillomavirus
LIRFRCSKN

SEQ ID NO: 49606 - protein, 9 aa, Artificial Sequence
  Peptide Derived from Human Papillomavirus
LKGCVISCV

SEQ ID NO: 49607 - protein, 9 aa, Artificial Sequence
  Peptide Derived from Human Papillomavirus
VQGTTPEWI

SEQ ID NO: 49608 - protein, 9 aa, Artificial Sequence
  Peptide Derived from Human Papillomavirus
MELVRPFKS

SEQ ID NO: 49609 - protein, 9 aa, Artificial Sequence
  Peptide Derived from Human Papillomavirus
YGISPSVAE

SEQ ID NO: 49610 - protein, 9 aa, Artificial Sequence
  Peptide Derived from Human Papillomavirus
YGISFMELV

SEQ ID NO: 49611 - protein, 9 aa, Artificial Sequence
  Peptide Derived from Human Papillomavirus
MIDDVTPIS

SEQ ID NO: 49612 - protein, 9 aa, Artificial Sequence
  Peptide Derived from Human Papillomavirus
LTVAKLMSN

SEQ ID NO: 49613 - protein, 9 aa, Artificial Sequence
  Peptide Derived from Human Papillomavirus
MLICGPANT

SEQ ID NO: 49614 - protein, 9 aa, Artificial Sequence
  Peptide Derived from Human Papillomavirus
FSRTWCKLD

SEQ ID NO: 49615 - protein, 9 aa, Artificial Sequence
  Peptide Derived from Human Papillomavirus
FWLQPLSDA

SEQ ID NO: 49616 - protein, 9 aa, Artificial Sequence
  Peptide Derived from Human Papillomavirus
FGMSLIQFL

SEQ ID NO: 49617 - protein, 9 aa, Artificial Sequence
  Peptide Derived from Human Papillomavirus
IKQHSLYTH

SEQ ID NO: 49618 - protein, 9 aa, Artificial Sequence
  Peptide Derived from Human Papillomavirus
FLKGCVISC

SEQ ID NO: 49619 - protein, 9 aa, Artificial Sequence
  Peptide Derived from Human Papillomavirus
IPKKSCMLI

SEQ ID NO: 49620 - protein, 9 aa, Artificial Sequence
  Peptide Derived from Human Papillomavirus
LIKQHSLYT

SEQ ID NO: 49621 - protein, 9 aa, Artificial Sequence
  Peptide Derived from Human Papillomavirus
FIDDSMENS

SEQ ID NO: 49622 - protein, 9 aa, Artificial Sequence
  Peptide Derived from Human Papillomavirus
IRFRCSKNR

SEQ ID NO: 49623 - protein, 9 aa, Artificial Sequence
  Peptide Derived from Human Papillomavirus
IPETCMVIE

SEQ ID NO: 49624 - protein, 9 aa, Artificial Sequence
  Peptide Derived from Human Papillomavirus
LESSGVGDD

SEQ ID NO: 49625 - protein, 9 aa, Artificial Sequence
  Peptide Derived from Human Papillomavirus
LSDAKIGMI

SEQ ID NO: 49626 - protein, 9 aa, Artificial Sequence
  Peptide Derived from Human Papillomavirus
FEFKNPFPF

SEQ ID NO: 49627 - protein, 9 aa, Artificial Sequence
  Peptide Derived from Human Papillomavirus
LKCPPLLLT

SEQ ID NO: 49628 - protein, 9 aa, Artificial Sequence
  Peptide Derived from Human Papillomavirus
FRTAMSNIS

SEQ ID NO: 49629 - protein, 9 aa, Artificial Sequence
  Peptide Derived from Human Papillomavirus
VRPFKSDKT

SEQ ID NO: 49630 - protein, 9 aa, Artificial Sequence
  Peptide Derived from Human Papillomavirus
YKFKEAYGI

SEQ ID NO: 49631 - protein, 9 aa, Artificial Sequence
  Peptide Derived from Human Papillomavirus
VETQQMVQQ

SEQ ID NO: 49632 - protein, 9 aa, Artificial Sequence
  Peptide Derived from Human Papillomavirus
IDRLTVLQH

SEQ ID NO: 49633 - protein, 9 aa, Artificial Sequence
  Peptide Derived from Human Papillomavirus
LRSQTCALY

SEQ ID NO: 49634 - protein, 9 aa, Artificial Sequence
  Peptide Derived from Human Papillomavirus
LLTSNTNAG

SEQ ID NO: 49635 - protein, 9 aa, Artificial Sequence
  Peptide Derived from Human Papillomavirus
VQQVESQNG

SEQ ID NO: 49636 - protein, 9 aa, Artificial Sequence
  Peptide Derived from Human Papillomavirus
YDNELTDDS

SEQ ID NO: 49637 - protein, 9 aa, Artificial Sequence
  Peptide Derived from Human Papillomavirus
VQLKCPPLL

SEQ ID NO: 49638 - protein, 9 aa, Artificial Sequence
  Peptide Derived from Human Papillomavirus
IILLLIRFR

SEQ ID NO: 49639 - protein, 9 aa, Artificial Sequence
  Peptide Derived from Human Papillomavirus
VAKLMSNLL

SEQ ID NO: 49640 - protein, 9 aa, Artificial Sequence
  Peptide Derived from Human Papillomavirus
LDGNEISID

SEQ ID NO: 49641 - protein, 9 aa, Artificial Sequence
  Peptide Derived from Human Papillomavirus
YLHSRLTVF

SEQ ID NO: 49642 - protein, 9 aa, Artificial Sequence
  Peptide Derived from Human Papillomavirus
LICGPANTG

SEQ ID NO: 49643 - protein, 9 aa, Artificial Sequence
  Peptide Derived from Human Papillomavirus
WLQPLSDAK

SEQ ID NO: 49644 - protein, 9 aa, Artificial Sequence
  Peptide Derived from Human Papillomavirus
VKHRALVQL

SEQ ID NO: 49645 - protein, 9 aa, Artificial Sequence
  Peptide Derived from Human Papillomavirus
LSIPETCMV

SEQ ID NO: 49646 - protein, 9 aa, Artificial Sequence
  Peptide Derived from Human Papillomavirus
LHSSNTKAN

SEQ ID NO: 49647 - protein, 9 aa, Artificial Sequence
  Peptide Derived from Human Papillomavirus
WCKLDLIEE

SEQ ID NO: 49648 - protein, 9 aa, Artificial Sequence
  Peptide Derived from Human Papillomavirus
YIDDYMRNA

SEQ ID NO: 49649 - protein, 9 aa, Artificial Sequence
  Peptide Derived from Human Papillomavirus
LYWFRTAMS

SEQ ID NO: 49650 - protein, 9 aa, Artificial Sequence
  Peptide Derived from Human Papillomavirus
FEVEAVIER

SEQ ID NO: 49651 - protein, 9 aa, Artificial Sequence
  Peptide Derived from Human Papillomavirus
WIDRLTVLQ

SEQ ID NO: 49652 - protein, 9 aa, Artificial Sequence
  Peptide Derived from Human Papillomavirus
LMSNLLSIP

SEQ ID NO: 49653 - protein, 9 aa, Artificial Sequence
  Peptide Derived from Human Papillomavirus
LKRKFAACS

SEQ ID NO: 49654 - protein, 9 aa, Artificial Sequence
  Peptide Derived from Human Papillomavirus
VIERRTGDN

SEQ ID NO: 49655 - protein, 9 aa, Artificial Sequence
  Peptide Derived from Human Papillomavirus
FKNPFPFDE

SEQ ID NO: 49656 - protein, 9 aa, Artificial Sequence
  Peptide Derived from Human Papillomavirus
LRYQNIEFT

SEQ ID NO: 49657 - protein, 9 aa, Artificial Sequence
  Peptide Derived from Human Papillomavirus
FKSDKTSCT

SEQ ID NO: 49658 - protein, 9 aa, Artificial Sequence
  Peptide Derived from Human Papillomavirus
ISWTYIDDY

SEQ ID NO: 49659 - protein, 9 aa, Artificial Sequence
  Peptide Derived from Human Papillomavirus
LHSRLTVFE

SEQ ID NO: 49660 - protein, 9 aa, Artificial Sequence
  Peptide Derived from Human Papillomavirus
LADSNSNAA

SEQ ID NO: 49661 - protein, 9 aa, Artificial Sequence
  Peptide Derived from Human Papillomavirus
LQCLTCDRG

SEQ ID NO: 49662 - protein, 9 aa, Artificial Sequence
  Peptide Derived from Human Papillomavirus
MEEISARLN

SEQ ID NO: 49663 - protein, 9 aa, Artificial Sequence
  Peptide Derived from Human Papillomavirus
YSKTQMWEV

SEQ ID NO: 49664 - protein, 9 aa, Artificial Sequence
  Peptide Derived from Human Papillomavirus
VIELQMALE

SEQ ID NO: 49665 - protein, 9 aa, Artificial Sequence
  Peptide Derived from Human Papillomavirus
MGFSHLCHQ

SEQ ID NO: 49666 - protein, 9 aa, Artificial Sequence
  Peptide Derived from Human Papillomavirus
YTAKQMGFS

SEQ ID NO: 49667 - protein, 9 aa, Artificial Sequence
  Peptide Derived from Human Papillomavirus
LTKLFCADP

SEQ ID NO: 49668 - protein, 9 aa, Artificial Sequence
  Peptide Derived from Human Papillomavirus
VVPSLLASK

SEQ ID NO: 49669 - protein, 9 aa, Artificial Sequence
  Peptide Derived from Human Papillomavirus
LDNRTARTA

SEQ ID NO: 49670 - protein, 9 aa, Artificial Sequence
  Peptide Derived from Human Papillomavirus
IIEEDTCTM

SEQ ID NO: 49671 - protein, 9 aa, Artificial Sequence
  Peptide Derived from Human Papillomavirus
LDLYEADKT

SEQ ID NO: 49672 - protein, 9 aa, Artificial Sequence
  Peptide Derived from Human Papillomavirus
MALETLSKS

SEQ ID NO: 49673 - protein, 9 aa, Artificial Sequence
  Peptide Derived from Human Papillomavirus
VGGQVIVCP

SEQ ID NO: 49674 - protein, 9 aa, Artificial Sequence
  Peptide Derived from Human Papillomavirus
FKEDAAKYS

SEQ ID NO: 49675 - protein, 9 aa, Artificial Sequence
  Peptide Derived from Human Papillomavirus
IELQMALET

SEQ ID NO: 49676 - protein, 9 aa, Artificial Sequence
  Peptide Derived from Human Papillomavirus
LCHQVVPSL

SEQ ID NO: 49677 - protein, 9 aa, Artificial Sequence
  Peptide Derived from Human Papillomavirus
VIVCPTSIS

SEQ ID NO: 49678 - protein, 9 aa, Artificial Sequence
  Peptide Derived from Human Papillomavirus
IVCPTSISS

SEQ ID NO: 49679 - protein, 9 aa, Artificial Sequence
  Peptide Derived from Human Papillomavirus
VPSLLASKT

SEQ ID NO: 49680 - protein, 9 aa, Artificial Sequence
  Peptide Derived from Human Papillomavirus
LIRMECALL

SEQ ID NO: 49681 - protein, 9 aa, Artificial Sequence
  Peptide Derived from Human Papillomavirus
WKLIRMECA

SEQ ID NO: 49682 - protein, 9 aa, Artificial Sequence
  Peptide Derived from Human Papillomavirus
YYIHNCEKV

SEQ ID NO: 49683 - protein, 9 aa, Artificial Sequence
  Peptide Derived from Human Papillomavirus
IEEDTCTMV

SEQ ID NO: 49684 - protein, 9 aa, Artificial Sequence
  Peptide Derived from Human Papillomavirus
YSSMSSTWH

SEQ ID NO: 49685 - protein, 9 aa, Artificial Sequence
  Peptide Derived from Human Papillomavirus
MWEVHVGGQ

SEQ ID NO: 49686 - protein, 9 aa, Artificial Sequence
  Peptide Derived from Human Papillomavirus
YEADKTDLP

SEQ ID NO: 49687 - protein, 9 aa, Artificial Sequence
  Peptide Derived from Human Papillomavirus
WLCEPPKCF

SEQ ID NO: 49688 - protein, 9 aa, Artificial Sequence
  Peptide Derived from Human Papillomavirus
VKIPPTVQI

SEQ ID NO: 49689 - protein, 9 aa, Artificial Sequence
  Peptide Derived from Human Papillomavirus
MECALLYTA

SEQ ID NO: 49690 - protein, 9 aa, Artificial Sequence
  Peptide Derived from Human Papillomavirus
YKELYSSMS

SEQ ID NO: 49691 - protein, 9 aa, Artificial Sequence
  Peptide Derived from Human Papillomavirus
VQEKILDLY

SEQ ID NO: 49692 - protein, 9 aa, Artificial Sequence
  Peptide Derived from Human Papillomavirus
LFCADPALD

SEQ ID NO: 49693 - protein, 9 aa, Artificial Sequence
  Peptide Derived from Human Papillomavirus
VTVTFVTEQ

SEQ ID NO: 49694 - protein, 9 aa, Artificial Sequence
  Peptide Derived from Human Papillomavirus
IEHWKLIRM

SEQ ID NO: 49695 - protein, 9 aa, Artificial Sequence
  Peptide Derived from Human Papillomavirus
ISSNQISTT

SEQ ID NO: 49696 - protein, 9 aa, Artificial Sequence
  Peptide Derived from Human Papillomavirus
LGTVKIPPT

SEQ ID NO: 49697 - protein, 9 aa, Artificial Sequence
  Peptide Derived from Human Papillomavirus
MFLGTVKIP

SEQ ID NO: 49698 - protein, 9 aa, Artificial Sequence
  Peptide Derived from Human Papillomavirus
VCSSNVAPI

SEQ ID NO: 49699 - protein, 9 aa, Artificial Sequence
  Peptide Derived from Human Papillomavirus
LEVWLCEPP

SEQ ID NO: 49700 - protein, 9 aa, Artificial Sequence
  Peptide Derived from Human Papillomavirus
VCPTSISSN

SEQ ID NO: 49701 - protein, 9 aa, Artificial Sequence
  Peptide Derived from Human Papillomavirus
LQQTSLEVW

SEQ ID NO: 49702 - protein, 9 aa, Artificial Sequence
  Peptide Derived from Human Papillomavirus
VWLCEPPKC

SEQ ID NO: 49703 - protein, 9 aa, Artificial Sequence
  Peptide Derived from Human Papillomavirus
ISTTETADI

SEQ ID NO: 49704 - protein, 9 aa, Artificial Sequence
  Peptide Derived from Human Papillomavirus
MVTGKVDYI

SEQ ID NO: 49705 - protein, 9 aa, Artificial Sequence
  Peptide Derived from Human Papillomavirus
VDYIGMYYI

SEQ ID NO: 49706 - protein, 9 aa, Artificial Sequence
  Peptide Derived from Human Papillomavirus
FQVIELQMA

SEQ ID NO: 49707 - protein, 9 aa, Artificial Sequence
  Peptide Derived from Human Papillomavirus
FCADPALDN

SEQ ID NO: 49708 - protein, 9 aa, Artificial Sequence
  Peptide Derived from Human Papillomavirus
WTLQQTSLE

SEQ ID NO: 49709 - protein, 9 aa, Artificial Sequence
  Peptide Derived from Human Papillomavirus
IGMYYIHNC

SEQ ID NO: 49710 - protein, 9 aa, Artificial Sequence
  Peptide Derived from Human Papillomavirus
LLASKTKAF

SEQ ID NO: 49711 - protein, 9 aa, Artificial Sequence
  Peptide Derived from Human Papillomavirus
IRMECALLY

SEQ ID NO: 49712 - protein, 9 aa, Artificial Sequence
  Peptide Derived from Human Papillomavirus
YFKEDAAKY

SEQ ID NO: 49713 - protein, 9 aa, Artificial Sequence
  Peptide Derived from Human Papillomavirus
LYSSMSSTW

SEQ ID NO: 49714 - protein, 9 aa, Artificial Sequence
  Peptide Derived from Human Papillomavirus
WGEIYIIEE

SEQ ID NO: 49715 - protein, 9 aa, Artificial Sequence
  Peptide Derived from Human Papillomavirus
MIFVFVLCF

SEQ ID NO: 49716 - protein, 9 aa, Artificial Sequence
  Peptide Derived from Human Papillomavirus
IFVFVLCFI

SEQ ID NO: 49717 - protein, 9 aa, Artificial Sequence
  Peptide Derived from Human Papillomavirus
FVFVLCFIL

SEQ ID NO: 49718 - protein, 9 aa, Artificial Sequence
  Peptide Derived from Human Papillomavirus
LVLVLLLWV

SEQ ID NO: 49719 - protein, 9 aa, Artificial Sequence
  Peptide Derived from Human Papillomavirus
LFLCLSLLL

SEQ ID NO: 49720 - protein, 9 aa, Artificial Sequence
  Peptide Derived from Human Papillomavirus
FHAQHMTQQ

SEQ ID NO: 49721 - protein, 9 aa, Artificial Sequence
  Peptide Derived from Human Papillomavirus
LLLRPLILS

SEQ ID NO: 49722 - protein, 9 aa, Artificial Sequence
  Peptide Derived from Human Papillomavirus
LFLYLPMMC

SEQ ID NO: 49723 - protein, 9 aa, Artificial Sequence
  Peptide Derived from Human Papillomavirus
LLFLYLPMM

SEQ ID NO: 49724 - protein, 9 aa, Artificial Sequence
  Peptide Derived from Human Papillomavirus
FLCLSLLLR

SEQ ID NO: 49725 - protein, 9 aa, Artificial Sequence
  Peptide Derived from Human Papillomavirus
LPMMCINFH

SEQ ID NO: 49726 - protein, 9 aa, Artificial Sequence
  Peptide Derived from Human Papillomavirus
VLCFILFLC

SEQ ID NO: 49727 - protein, 9 aa, Artificial Sequence
  Peptide Derived from Human Papillomavirus
LKIFFCYLL

SEQ ID NO: 49728 - protein, 9 aa, Artificial Sequence
  Peptide Derived from Human Papillomavirus
FVLCFILFL

SEQ ID NO: 49729 - protein, 9 aa, Artificial Sequence
  Peptide Derived from Human Papillomavirus
LCLSLLLRP

SEQ ID NO: 49730 - protein, 9 aa, Artificial Sequence
  Peptide Derived from Human Papillomavirus
YAWLLVLVL

SEQ ID NO: 49731 - protein, 9 aa, Artificial Sequence
  Peptide Derived from Human Papillomavirus
ILFLCLSLL

SEQ ID NO: 49732 - protein, 9 aa, Artificial Sequence
  Peptide Derived from Human Papillomavirus
YLPMMCINF

SEQ ID NO: 49733 - protein, 9 aa, Artificial Sequence
  Peptide Derived from Human Papillomavirus
FFCYLLFLY

SEQ ID NO: 49734 - protein, 9 aa, Artificial Sequence
  Peptide Derived from Human Papillomavirus
LYLPMMCIN

SEQ ID NO: 49735 - protein, 9 aa, Artificial Sequence
  Peptide Derived from Human Papillomavirus
WVFVGSPLK

SEQ ID NO: 49736 - protein, 9 aa, Artificial Sequence
  Peptide Derived from Human Papillomavirus
VFVGSPLKI

SEQ ID NO: 49737 - protein, 9 aa, Artificial Sequence
  Peptide Derived from Human Papillomavirus
LILSISTYA

SEQ ID NO: 49738 - protein, 9 aa, Artificial Sequence
  Peptide Derived from Human Papillomavirus
LLRPLILSI

SEQ ID NO: 49739 - protein, 9 aa, Artificial Sequence
  Peptide Derived from Human Papillomavirus
LLWVFVGSP

SEQ ID NO: 49740 - protein, 9 aa, Artificial Sequence
  Peptide Derived from Human Papillomavirus
VLLLWVFVG

SEQ ID NO: 49741 - protein, 9 aa, Artificial Sequence
  Peptide Derived from Human Papillomavirus
FVGSPLKIF

SEQ ID NO: 49742 - protein, 9 aa, Artificial Sequence
  Peptide Derived from Human Papillomavirus
IFFCYLLFL

SEQ ID NO: 49743 - protein, 9 aa, Artificial Sequence
  Peptide Derived from Human Papillomavirus
ILSISTYAW

SEQ ID NO: 49744 - protein, 9 aa, Artificial Sequence
  Peptide Derived from Human Papillomavirus
LRPLILSIS

SEQ ID NO: 49745 - protein, 9 aa, Artificial Sequence
  Peptide Derived from Human Papillomavirus
WLLVLVLLL

SEQ ID NO: 49746 - protein, 9 aa, Artificial Sequence
  Peptide Derived from Human Papillomavirus
FILFLCLSL

SEQ ID NO: 49747 - protein, 9 aa, Artificial Sequence
  Peptide Derived from Human Papillomavirus
VLVLLLWVF

SEQ ID NO: 49748 - protein, 9 aa, Artificial Sequence
  Peptide Derived from Human Papillomavirus
LLVLVLLLW

SEQ ID NO: 49749 - protein, 9 aa, Artificial Sequence
  Peptide Derived from Human Papillomavirus
FLYLPMMCI

SEQ ID NO: 49750 - protein, 9 aa, Artificial Sequence
  Peptide Derived from Human Papillomavirus
FLSKISEYR

SEQ ID NO: 49751 - protein, 9 aa, Artificial Sequence
  Peptide Derived from Human Papillomavirus
FADLTVVYR

SEQ ID NO: 49752 - protein, 9 aa, Artificial Sequence
  Peptide Derived from Human Papillomavirus
IRCIICQRP

SEQ ID NO: 49753 - protein, 9 aa, Artificial Sequence
  Peptide Derived from Human Papillomavirus
IHNIELQCV

SEQ ID NO: 49754 - protein, 9 aa, Artificial Sequence
  Peptide Derived from Human Papillomavirus
ISGRWAGRC

SEQ ID NO: 49755 - protein, 9 aa, Artificial Sequence
  Peptide Derived from Human Papillomavirus
FGICKLCLR

SEQ ID NO: 49756 - protein, 9 aa, Artificial Sequence
  Peptide Derived from Human Papillomavirus
LCLRFLSKI

SEQ ID NO: 49757 - protein, 9 aa, Artificial Sequence
  Peptide Derived from Human Papillomavirus
IELQCVECK

SEQ ID NO: 49758 - protein, 9 aa, Artificial Sequence
  Peptide Derived from Human Papillomavirus
IICQRPLCP

SEQ ID NO: 49759 - protein, 9 aa, Artificial Sequence
  Peptide Derived from Human Papillomavirus
LNEILIRCI

SEQ ID NO: 49760 - protein, 9 aa, Artificial Sequence
  Peptide Derived from Human Papillomavirus
LQRSEVYDF

SEQ ID NO: 49761 - protein, 9 aa, Artificial Sequence
  Peptide Derived from Human Papillomavirus
ILIRCIICQ

SEQ ID NO: 49762 - protein, 9 aa, Artificial Sequence
  Peptide Derived from Human Papillomavirus
VECKKPLQR

SEQ ID NO: 49763 - protein, 9 aa, Artificial Sequence
  Peptide Derived from Human Papillomavirus
LIRCIICQR

SEQ ID NO: 49764 - protein, 9 aa, Artificial Sequence
  Peptide Derived from Human Papillomavirus
LQCVECKKP

SEQ ID NO: 49765 - protein, 9 aa, Artificial Sequence
  Peptide Derived from Human Papillomavirus
VYGNTLEQT

SEQ ID NO: 49766 - protein, 9 aa, Artificial Sequence
  Peptide Derived from Human Papillomavirus
ICKLCLRFL

SEQ ID NO: 49767 - protein, 9 aa, Artificial Sequence
  Peptide Derived from Human Papillomavirus
ICQRPLCPQ

SEQ ID NO: 49768 - protein, 9 aa, Artificial Sequence
  Peptide Derived from Human Papillomavirus
YDFAFADLT

SEQ ID NO: 49769 - protein, 9 aa, Artificial Sequence
  Peptide Derived from Human Papillomavirus
WAGRCAACW

SEQ ID NO: 49770 - protein, 9 aa, Artificial Sequence
  Peptide Derived from Human Papillomavirus
YREGNPFGI

SEQ ID NO: 49771 - protein, 9 aa, Artificial Sequence
  Peptide Derived from Human Papillomavirus
FAFADLTVV

SEQ ID NO: 49772 - protein, 9 aa, Artificial Sequence
  Peptide Derived from Human Papillomavirus
MRGHKPTLK

SEQ ID NO: 49773 - protein, 9 aa, Artificial Sequence
  Peptide Derived from Human Papillomavirus
YIVTCCHTC

SEQ ID NO: 49774 - protein, 9 aa, Artificial Sequence
  Peptide Derived from Human Papillomavirus
LLMGTVNIV

SEQ ID NO: 49775 - protein, 9 aa, Artificial Sequence
  Peptide Derived from Human Papillomavirus
VLDLYPEPT

SEQ ID NO: 49776 - protein, 9 aa, Artificial Sequence
  Peptide Derived from Human Papillomavirus
LKEYVLDLY

SEQ ID NO: 49777 - protein, 9 aa, Artificial Sequence
  Peptide Derived from Human Papillomavirus
IQQLLMGTV

SEQ ID NO: 49778 - protein, 9 aa, Artificial Sequence
  Peptide Derived from Human Papillomavirus
VNIVCPTCA

SEQ ID NO: 49779 - protein, 9 aa, Artificial Sequence
  Peptide Derived from Human Papillomavirus
MGTVNIVCP

SEQ ID NO: 49780 - protein, 9 aa, Artificial Sequence
  Peptide Derived from Human Papillomavirus
VNSTASDLR

SEQ ID NO: 49781 - protein, 9 aa, Artificial Sequence
  Peptide Derived from Human Papillomavirus
YYIVTCCHT

SEQ ID NO: 49782 - protein, 9 aa, Artificial Sequence
  Peptide Derived from Human Papillomavirus
YCYEQLSDS

SEQ ID NO: 49783 - protein, 9 aa, Artificial Sequence
  Peptide Derived from Human Papillomavirus
IVCPTCAQQ

SEQ ID NO: 49784 - protein, 9 aa, Artificial Sequence
  Peptide Derived from Human Papillomavirus
LCVNSTASD

SEQ ID NO: 49785 - protein, 9 aa, Artificial Sequence
  Peptide Derived from Human Papillomavirus
LYPEPTDLY

SEQ ID NO: 49786 - protein, 9 aa, Artificial Sequence
  Peptide Derived from Human Papillomavirus
VTCCHTCNT

SEQ ID NO: 49787 - protein, 9 aa, Artificial Sequence
  Peptide Derived from Human Papillomavirus
MSVWRPSEA

SEQ ID NO: 49788 - protein, 9 aa, Artificial Sequence
  Peptide Derived from Human Papillomavirus
MTYIHAMNP

SEQ ID NO: 49789 - protein, 9 aa, Artificial Sequence
  Peptide Derived from Human Papillomavirus
LGEAVPDDL

SEQ ID NO: 49790 - protein, 9 aa, Artificial Sequence
  Peptide Derived from Human Papillomavirus
LLVPKVSGL

SEQ ID NO: 49791 - protein, 9 aa, Artificial Sequence
  Peptide Derived from Human Papillomavirus
YLPPVPVSK

SEQ ID NO: 49792 - protein, 9 aa, Artificial Sequence
  Peptide Derived from Human Papillomavirus
MDYKQTQLC

SEQ ID NO: 49793 - protein, 9 aa, Artificial Sequence
  Peptide Derived from Human Papillomavirus
FKTLQANKS

SEQ ID NO: 49794 - protein, 9 aa, Artificial Sequence
  Peptide Derived from Human Papillomavirus
LELINTIIE

SEQ ID NO: 49795 - protein, 9 aa, Artificial Sequence
  Peptide Derived from Human Papillomavirus
VTSDSTYKN

SEQ ID NO: 49796 - protein, 9 aa, Artificial Sequence
  Peptide Derived from Human Papillomavirus
VSRTSIYYY

SEQ ID NO: 49797 - protein, 9 aa, Artificial Sequence
  Peptide Derived from Human Papillomavirus
FVFQLCKVT

SEQ ID NO: 49798 - protein, 9 aa, Artificial Sequence
  Peptide Derived from Human Papillomavirus
IKGSGTTAS

SEQ ID NO: 49799 - protein, 9 aa, Artificial Sequence
  Peptide Derived from Human Papillomavirus
FYNPDTQRL

SEQ ID NO: 49800 - protein, 9 aa, Artificial Sequence
  Peptide Derived from Human Papillomavirus
IDICGSTCK

SEQ ID NO: 49801 - protein, 9 aa, Artificial Sequence
  Peptide Derived from Human Papillomavirus
FGLTPPPSA

SEQ ID NO: 49802 - protein, 9 aa, Artificial Sequence
  Peptide Derived from Human Papillomavirus
VYLPPVPVS

SEQ ID NO: 49803 - protein, 9 aa, Artificial Sequence
  Peptide Derived from Human Papillomavirus
LKEKFSADL

SEQ ID NO: 49804 - protein, 9 aa, Artificial Sequence
  Peptide Derived from Human Papillomavirus
LRREQMFVR

SEQ ID NO: 49805 - protein, 9 aa, Artificial Sequence
  Peptide Derived from Human Papillomavirus
MDFKTLQAN

SEQ ID NO: 49806 - protein, 9 aa, Artificial Sequence
  Peptide Derived from Human Papillomavirus
LQANKSDVP

SEQ ID NO: 49807 - protein, 9 aa, Artificial Sequence
  Peptide Derived from Human Papillomavirus
WGKGVACTN

SEQ ID NO: 49808 - protein, 9 aa, Artificial Sequence
  Peptide Derived from Human Papillomavirus
VACTNAAPA

SEQ ID NO: 49809 - protein, 9 aa, Artificial Sequence
  Peptide Derived from Human Papillomavirus
IGRGQPLGV

SEQ ID NO: 49810 - protein, 9 aa, Artificial Sequence
  Peptide Derived from Human Papillomavirus
YRVFRVRLP

SEQ ID NO: 49811 - protein, 9 aa, Artificial Sequence
  Peptide Derived from Human Papillomavirus
VFVTVVDTT

SEQ ID NO: 49812 - protein, 9 aa, Artificial Sequence
  Peptide Derived from Human Papillomavirus
LGVGISGHP

SEQ ID NO: 49813 - protein, 9 aa, Artificial Sequence
  Peptide Derived from Human Papillomavirus
ISGHPLLNK

SEQ ID NO: 49814 - protein, 9 aa, Artificial Sequence
  Peptide Derived from Human Papillomavirus
FSIKNPTNA

SEQ ID NO: 49815 - protein, 9 aa, Artificial Sequence
  Peptide Derived from Human Papillomavirus
MNPDILEDW

SEQ ID NO: 49816 - protein, 9 aa, Artificial Sequence
  Peptide Derived from Human Papillomavirus
VEEYDLQFV

SEQ ID NO: 49817 - protein, 9 aa, Artificial Sequence
  Peptide Derived from Human Papillomavirus
LVPKVSGLQ

SEQ ID NO: 49818 - protein, 9 aa, Artificial Sequence
  Peptide Derived from Human Papillomavirus
LKRAAPTST

SEQ ID NO: 49819 - protein, 9 aa, Artificial Sequence
  Peptide Derived from Human Papillomavirus
VPIDICGST

SEQ ID NO: 49820 - protein, 9 aa, Artificial Sequence
  Peptide Derived from Human Papillomavirus
LTAEVMTYI

SEQ ID NO: 49821 - protein, 9 aa, Artificial Sequence
  Peptide Derived from Human Papillomavirus
FWEVDLKEK

SEQ ID NO: 49822 - protein, 9 aa, Artificial Sequence
  Peptide Derived from Human Papillomavirus
LGCKPPTGE

SEQ ID NO: 49823 - protein, 9 aa, Artificial Sequence
  Peptide Derived from Human Papillomavirus
WQFGLTPPP

SEQ ID NO: 49824 - protein, 9 aa, Artificial Sequence
  Peptide Derived from Human Papillomavirus
YTFWEVDLK

SEQ ID NO: 49825 - protein, 9 aa, Artificial Sequence
  Peptide Derived from Human Papillomavirus
FDDTETGNK

SEQ ID NO: 49826 - protein, 9 aa, Artificial Sequence
  Peptide Derived from Human Papillomavirus
VPVSKVVST

SEQ ID NO: 49827 - protein, 9 aa, Artificial Sequence
  Peptide Derived from Human Papillomavirus
WRPSEATVY

SEQ ID NO: 49828 - protein, 9 aa, Artificial Sequence
  Peptide Derived from Human Papillomavirus
IHAMNPDIL

SEQ ID NO: 49829 - protein, 9 aa, Artificial Sequence
  Peptide Derived from Human Papillomavirus
YWLQRAQGH

SEQ ID NO: 49830 - protein, 9 aa, Artificial Sequence
  Peptide Derived from Human Papillomavirus
LCTQVTSDS

SEQ ID NO: 49831 - protein, 9 aa, Artificial Sequence
  Peptide Derived from Human Papillomavirus
IEDGDMVDT

SEQ ID NO: 49832 - protein, 9 aa, Artificial Sequence
  Peptide Derived from Human Papillomavirus
LYIKGSGTT

SEQ ID NO: 49833 - protein, 9 aa, Artificial Sequence
  Peptide Derived from Human Papillomavirus
ICGSTCKYP

SEQ ID NO: 49834 - protein, 9 aa, Artificial Sequence
  Peptide Derived from Human Papillomavirus
LINTIIEDG

SEQ ID NO: 49835 - protein, 9 aa, Artificial Sequence
  Peptide Derived from Human Papillomavirus
FGFPDTSFY

SEQ ID NO: 49836 - protein, 9 aa, Artificial Sequence
  Peptide Derived from Human Papillomavirus
VSKVVSTDE

SEQ ID NO: 49837 - protein, 9 aa, Artificial Sequence
  Peptide Derived from Human Papillomavirus
YRFVTSQAI

SEQ ID NO: 49838 - protein, 9 aa, Artificial Sequence
  Peptide Derived from Human Papillomavirus
LTPPPSASL

SEQ ID NO: 49839 - protein, 9 aa, Artificial Sequence
  Peptide Derived from Human Papillomavirus
LGRKFLLQA

SEQ ID NO: 49840 - protein, 9 aa, Artificial Sequence
  Peptide Derived from Human Papillomavirus
FQLCKVTLT

SEQ ID NO: 49841 - protein, 9 aa, Artificial Sequence
  Peptide Derived from Human Papillomavirus
LLGCKPPTG

SEQ ID NO: 49842 - protein, 9 aa, Artificial Sequence
  Peptide Derived from Human Papillomavirus
LCLLGCKPP

SEQ ID NO: 49843 - protein, 9 aa, Artificial Sequence
  Peptide Derived from Human Papillomavirus
VTVVDTTRS

SEQ ID NO: 49844 - protein, 9 aa, Artificial Sequence
  Peptide Derived from Human Papillomavirus
VFRVRLPDP

SEQ ID NO: 49845 - protein, 9 aa, Artificial Sequence
  Peptide Derived from Human Papillomavirus
FNRAGTLGE

SEQ ID NO: 49846 - protein, 9 aa, Artificial Sequence
  Peptide Derived from Human Papillomavirus
LLQAGLKAK

SEQ ID NO: 49847 - protein, 9 aa, Artificial Sequence
  Peptide Derived from Human Papillomavirus
WACVGLEIG

SEQ ID NO: 49848 - protein, 9 aa, Artificial Sequence
  Peptide Derived from Human Papillomavirus
LDQFPLGRK

SEQ ID NO: 49849 - protein, 9 aa, Artificial Sequence
  Peptide Derived from Human Papillomavirus
MVTSESQLF

SEQ ID NO: 49850 - protein, 9 aa, Artificial Sequence
  Peptide Derived from Human Papillomavirus
YYAGSSRLL

SEQ ID NO: 49851 - protein, 9 aa, Artificial Sequence
  Peptide Derived from Human Papillomavirus
YKQTQLCLL

SEQ ID NO: 49852 - protein, 9 aa, Artificial Sequence
  Peptide Derived from Human Papillomavirus
ITCQKTVPP

SEQ ID NO: 49853 - protein, 9 aa, Artificial Sequence
  Peptide Derived from Human Papillomavirus
LAVGHPYFS

SEQ ID NO: 49854 - protein, 9 aa, Artificial Sequence
  Peptide Derived from Human Papillomavirus
FFPTPSGSM

SEQ ID NO: 49855 - protein, 9 aa, Artificial Sequence
  Peptide Derived from Human Papillomavirus
YVSRTSIYY

SEQ ID NO: 49856 - protein, 9 aa, Artificial Sequence
  Peptide Derived from Human Papillomavirus
LVWACVGLE

SEQ ID NO: 49857 - protein, 9 aa, Artificial Sequence
  Peptide Derived from Human Papillomavirus
YYYAGSSRL

SEQ ID NO: 49858 - protein, 9 aa, Artificial Sequence
  Peptide Derived from Human Papillomavirus
LPPVPVSKV

SEQ ID NO: 49859 - protein, 9 aa, Artificial Sequence
  Peptide Derived from Human Papillomavirus
FVTSQAITC

SEQ ID NO: 49860 - protein, 9 aa, Artificial Sequence
  Peptide Derived from Human Papillomavirus
YDLQFVFQL

SEQ ID NO: 49861 - protein, 9 aa, Artificial Sequence
  Peptide Derived from Human Papillomavirus
LCKVTLTAE

SEQ ID NO: 49862 - protein, 9 aa, Artificial Sequence
  Peptide Derived from Human Papillomavirus
VRLPDPNKF

SEQ ID NO: 49863 - protein, 9 aa, Artificial Sequence
  Peptide Derived from Human Papillomavirus
VDTTRSTNM

SEQ ID NO: 49864 - protein, 9 aa, Artificial Sequence
  Peptide Derived from Human Papillomavirus
YLKMTSEPY

SEQ ID NO: 49865 - protein, 9 aa, Artificial Sequence
  Peptide Derived from Human Papillomavirus
VTSQAITCQ

SEQ ID NO: 49866 - protein, 9 aa, Artificial Sequence
  Peptide Derived from Human Papillomavirus
FRVRLPDPN

SEQ ID NO: 49867 - protein, 9 aa, Artificial Sequence
  Peptide Derived from Human Papillomavirus
MRHKRSTRR

SEQ ID NO: 49868 - protein, 9 aa, Artificial Sequence
  Peptide Derived from Human Papillomavirus
VDNVHTPMQ

SEQ ID NO: 49869 - protein, 9 aa, Artificial Sequence
  Peptide Derived from Human Papillomavirus
ILKYGSLGV

SEQ ID NO: 49870 - protein, 9 aa, Artificial Sequence
  Peptide Derived from Human Papillomavirus
LQPIRPPVT

SEQ ID NO: 49871 - protein, 9 aa, Artificial Sequence
  Peptide Derived from Human Papillomavirus
FLDIIALHR

SEQ ID NO: 49872 - protein, 9 aa, Artificial Sequence
  Peptide Derived from Human Papillomavirus
LKYGSLGVF

SEQ ID NO: 49873 - protein, 9 aa, Artificial Sequence
  Peptide Derived from Human Papillomavirus
VVSTDSSNV

SEQ ID NO: 49874 - protein, 9 aa, Artificial Sequence
  Peptide Derived from Human Papillomavirus
LQFQHSDIS

SEQ ID NO: 49875 - protein, 9 aa, Artificial Sequence
  Peptide Derived from Human Papillomavirus
VLHPPAPAE

SEQ ID NO: 49876 - protein, 9 aa, Artificial Sequence
  Peptide Derived from Human Papillomavirus
IQTISTHLN

SEQ ID NO: 49877 - protein, 9 aa, Artificial Sequence
  Peptide Derived from Human Papillomavirus
FIEAGAPAP

SEQ ID NO: 49878 - protein, 9 aa, Artificial Sequence
  Peptide Derived from Human Papillomavirus
IVVDGADFV

SEQ ID NO: 49879 - protein, 9 aa, Artificial Sequence
  Peptide Derived from Human Papillomavirus
FDPEDTLQF

SEQ ID NO: 49880 - protein, 9 aa, Artificial Sequence
  Peptide Derived from Human Papillomavirus
FDTIVVDGA

SEQ ID NO: 49881 - protein, 9 aa, Artificial Sequence
  Peptide Derived from Human Papillomavirus
VGQKATLKT

SEQ ID NO: 49882 - protein, 9 aa, Artificial Sequence
  Peptide Derived from Human Papillomavirus
ISPFFPFDT

SEQ ID NO: 49883 - protein, 9 aa, Artificial Sequence
  Peptide Derived from Human Papillomavirus
FVLHPSYFI

SEQ ID NO: 49884 - protein, 9 aa, Artificial Sequence
  Peptide Derived from Human Papillomavirus
IFSSPTVST

SEQ ID NO: 49885 - protein, 9 aa, Artificial Sequence
  Peptide Derived from Human Papillomavirus
IADQILKYG

SEQ ID NO: 49886 - protein, 9 aa, Artificial Sequence
  Peptide Derived from Human Papillomavirus
FGGLGIGTG

SEQ ID NO: 49887 - protein, 9 aa, Artificial Sequence
  Peptide Derived from Human Papillomavirus
FSSPTVSTQ

SEQ ID NO: 49888 - protein, 9 aa, Artificial Sequence
  Peptide Derived from Human Papillomavirus
ITYDNPAFE

SEQ ID NO: 49889 - protein, 9 aa, Artificial Sequence
  Peptide Derived from Human Papillomavirus
MQHSYSTFA

SEQ ID NO: 49890 - protein, 9 aa, Artificial Sequence
  Peptide Derived from Human Papillomavirus
YQDLSPIVP

SEQ ID NO: 49891 - protein, 9 aa, Artificial Sequence
  Peptide Derived from Human Papillomavirus
LHRPAITSR

SEQ ID NO: 49892 - protein, 9 aa, Artificial Sequence
  Peptide Derived from Human Papillomavirus
YGSLGVFFG

SEQ ID NO: 49893 - protein, 9 aa, Artificial Sequence
  Peptide Derived from Human Papillomavirus
VEGSTIADQ

SEQ ID NO: 49894 - protein, 9 aa, Artificial Sequence
  Peptide Derived from Human Papillomavirus
FFPFDTIVV

SEQ ID NO: 49895 - protein, 9 aa, Artificial Sequence
  Peptide Derived from Human Papillomavirus
LDHTVPNEQ

SEQ ID NO: 49896 - protein, 9 aa, Artificial Sequence
  Peptide Derived from Human Papillomavirus
LIEETSFIE

SEQ ID NO: 49897 - protein, 9 aa, Artificial Sequence
  Peptide Derived from Human Papillomavirus
IALHRPAIT

SEQ ID NO: 49898 - protein, 9 aa, Artificial Sequence
  Peptide Derived from Human Papillomavirus
IRPPVTVDT

SEQ ID NO: 49899 - protein, 9 aa, Artificial Sequence
  Peptide Derived from Human Papillomavirus
LHDTSTSSY

SEQ ID NO: 49900 - protein, 9 aa, Artificial Sequence
  Peptide Derived from Human Papillomavirus
VYADDVDNV

SEQ ID NO: 49901 - protein, 9 aa, Artificial Sequence
  Peptide Derived from Human Papillomavirus
LYDVYADDV

SEQ ID NO: 49902 - protein, 9 aa, Artificial Sequence
  Peptide Derived from Human Papillomavirus
YELQPLHDT

SEQ ID NO: 49903 - protein, 9 aa, Artificial Sequence
  Peptide Derived from Human Papillomavirus
MDTFVVSTD

SEQ ID NO: 49904 - protein, 9 aa, Artificial Sequence
  Peptide Derived from Human Papillomavirus
FESFDPEDT

SEQ ID NO: 49905 - protein, 9 aa, Artificial Sequence
  Peptide Derived from Human Papillomavirus
FTEPSVLHP

SEQ ID NO: 49906 - protein, 9 aa, Artificial Sequence
  Peptide Derived from Human Papillomavirus
FDTPVMSGP

SEQ ID NO: 49907 - protein, 9 aa, Artificial Sequence
  Peptide Derived from Human Papillomavirus
INVSSVGES

SEQ ID NO: 49908 - protein, 9 aa, Artificial Sequence
  Peptide Derived from Human Papillomavirus
LDIIALHRP

SEQ ID NO: 49909 - protein, 9 aa, Artificial Sequence
  Peptide Derived from Human Papillomavirus
FDVTTSADT

SEQ ID NO: 49910 - protein, 9 aa, Artificial Sequence
  Peptide Derived from Human Papillomavirus
LFPTSSPFV

SEQ ID NO: 49911 - protein, 9 aa, Artificial Sequence
  Peptide Derived from Human Papillomavirus
LHPPAPAEA

SEQ ID NO: 49912 - protein, 9 aa, Artificial Sequence
  Peptide Derived from Human Papillomavirus
VDTVGPLDS

SEQ ID NO: 49913 - protein, 9 aa, Artificial Sequence
  Peptide Derived from Human Papillomavirus
YSTFATTRT

SEQ ID NO: 49914 - protein, 9 aa, Artificial Sequence
  Peptide Derived from Human Papillomavirus
YFFTDVRVA

SEQ ID NO: 49915 - protein, 9 aa, Artificial Sequence
  Peptide Derived from Human Papillomavirus
VRFSRVGQK

SEQ ID NO: 49916 - protein, 9 aa, Artificial Sequence
  Peptide Derived from Human Papillomavirus
YYQDLSPIV

SEQ ID NO: 49917 - protein, 9 aa, Artificial Sequence
  Peptide Derived from Human Papillomavirus
FPYFFTDVR

SEQ ID NO: 49918 - protein, 9 aa, Artificial Sequence
  Peptide Derived from Human Papillomavirus
LYSRNTQQV

SEQ ID NO: 49919 - protein, 9 aa, Artificial Sequence
  Peptide Derived from Human Papillomavirus
VTVDTVGPL

SEQ ID NO: 49920 - protein, 9 aa, Artificial Sequence
  Peptide Derived from Human Papillomavirus
YVPIGTDPP

SEQ ID NO: 49921 - protein, 9 aa, Artificial Sequence
  Peptide Derived from Human Papillomavirus
FIFSSPTVS

SEQ ID NO: 49922 - protein, 9 aa, Artificial Sequence
  Peptide Derived from Human Papillomavirus
VFFGGLGIG

SEQ ID NO: 49923 - protein, 9 aa, Artificial Sequence
  Peptide Derived from Human Papillomavirus
FPFDTIVVD

SEQ ID NO: 49924 - protein, 9 aa, Artificial Sequence
  Peptide Derived from Human Papillomavirus
VPLDHTVPN

SEQ ID NO: 49925 - protein, 9 aa, Artificial Sequence
  Peptide Derived from Human Papillomavirus
FPTSSPFVP

SEQ ID NO: 49926 - protein, 9 aa, Artificial Sequence
  Peptide Derived from Human Papillomavirus
VARLGLYSR

SEQ ID NO: 49927 - protein, 9 aa, Artificial Sequence
  Peptide Derived from Human Papillomavirus
VTSSTPIPG

SEQ ID NO: 49928 - protein, 9 aa, Artificial Sequence
  Peptide Derived from Human Papillomavirus
FVPISPFFP

SEQ ID NO: 49929 - protein, 9 aa, Artificial Sequence
  Peptide Derived from Human Papillomavirus
LNPTFTEPS

SEQ ID NO: 49930 - protein, 9 aa, Artificial Sequence
  Peptide Derived from Human Papillomavirus
IPGSRPVAR

SEQ ID NO: 49931 - protein, 9 aa, Artificial Sequence
  Peptide Derived from Human Papillomavirus
IPLQPIRPP

SEQ ID NO: 49932 - protein, 9 aa, Artificial Sequence
  Peptide Derived from Human Papillomavirus
VSTDSSNVT

SEQ ID NO: 49933 - protein, 9 aa, Artificial Sequence
  Peptide Derived from Human Papillomavirus
FQHSDISPA

SEQ ID NO: 49934 - protein, 9 aa, Artificial Sequence
  Peptide Derived from Human Papillomavirus
IINVSSVGE

SEQ ID NO: 49935 - protein, 9 aa, Artificial Sequence
  Peptide Derived from Human Papillomavirus
MSGPDIPSP

SEQ ID NO: 49936 - protein, 9 aa, Artificial Sequence
  Peptide Derived from Human Papillomavirus
YQTCKATGT

SEQ ID NO: 49937 - protein, 9 aa, Artificial Sequence
  Peptide Derived from Human Papillomavirus
VKVVDPAFL

SEQ ID NO: 49938 - protein, 9 aa, Artificial Sequence
  Peptide Derived from Human Papillomavirus
YENIPMDTF

SEQ ID NO: 49939 - protein, 9 aa, Artificial Sequence
  Peptide Derived from Human Papillomavirus
IEAGAPAPS

SEQ ID NO: 49940 - protein, 9 aa, Artificial Sequence
  Peptide Derived from Human Papillomavirus
VGPLDSSIV

SEQ ID NO: 49941 - protein, 9 aa, Artificial Sequence
  Peptide Derived from Human Papillomavirus
LDSSIVSLI

SEQ ID NO: 49942 - protein, 9 aa, Artificial Sequence
  Peptide Derived from Human Papillomavirus
VDPAFLTSP

SEQ ID NO: 49943 - protein, 9 aa, Artificial Sequence
  Peptide Derived from Human Papillomavirus
VGESSIQTI

SEQ ID NO: 49944 - protein, 9 aa, Artificial Sequence
  Peptide Derived from Human Papillomavirus
LSPIVPLDH

SEQ ID NO: 49945 - protein, 9 aa, Artificial Sequence
  Peptide Derived from Human Papillomavirus
FATTRTSNV

SEQ ID NO: 49946 - protein, 9 aa, Artificial Sequence
  Peptide Derived from Human Papillomavirus
IGTDPPTAA

SEQ ID NO: 49947 - protein, 9 aa, Artificial Sequence
  Peptide Derived from Human Papillomavirus
FLKSNCQAK

SEQ ID NO: 49948 - protein, 9 aa, Artificial Sequence
  Peptide Derived from Human Papillomavirus
VDPHCSITE

SEQ ID NO: 49949 - protein, 9 aa, Artificial Sequence
  Peptide Derived from Human Papillomavirus
LKDCAVMCR

SEQ ID NO: 49950 - protein, 9 aa, Artificial Sequence
  Peptide Derived from Human Papillomavirus
WYRTGISNI

SEQ ID NO: 49951 - protein, 9 aa, Artificial Sequence
  Peptide Derived from Human Papillomavirus
YAHIQCLDC

SEQ ID NO: 49952 - protein, 9 aa, Artificial Sequence
  Peptide Derived from Human Papillomavirus
IEPPKLRSS

SEQ ID NO: 49953 - protein, 9 aa, Artificial Sequence
  Peptide Derived from Human Papillomavirus
WFFVETIVE

SEQ ID NO: 49954 - protein, 9 aa, Artificial Sequence
  Peptide Derived from Human Papillomavirus
VEAAETQVT

SEQ ID NO: 49955 - protein, 9 aa, Artificial Sequence
  Peptide Derived from Human Papillomavirus
YFDNYMRNA

SEQ ID NO: 49956 - protein, 9 aa, Artificial Sequence
  Peptide Derived from Human Papillomavirus
WGVLILALL

SEQ ID NO: 49957 - protein, 9 aa, Artificial Sequence
  Peptide Derived from Human Papillomavirus
FQYAQLADC

SEQ ID NO: 49958 - protein, 9 aa, Artificial Sequence
  Peptide Derived from Human Papillomavirus
WPYLESRVT

SEQ ID NO: 49959 - protein, 9 aa, Artificial Sequence
  Peptide Derived from Human Papillomavirus
YGCSEVEAA

SEQ ID NO: 49960 - protein, 9 aa, Artificial Sequence
  Peptide Derived from Human Papillomavirus
FDLSDMVQW

SEQ ID NO: 49961 - protein, 9 aa, Artificial Sequence
  Peptide Derived from Human Papillomavirus
MAIFGVNPT

SEQ ID NO: 49962 - protein, 9 aa, Artificial Sequence
  Peptide Derived from Human Papillomavirus
WSRLDLHED

SEQ ID NO: 49963 - protein, 9 aa, Artificial Sequence
  Peptide Derived from Human Papillomavirus
MAFQYAQLA

SEQ ID NO: 49964 - protein, 9 aa, Artificial Sequence
  Peptide Derived from Human Papillomavirus
MLIEPPKLR

SEQ ID NO: 49965 - protein, 9 aa, Artificial Sequence
  Peptide Derived from Human Papillomavirus
YMRNALDGN

SEQ ID NO: 49966 - protein, 9 aa, Artificial Sequence
  Peptide Derived from Human Papillomavirus
FLQGAIISF

SEQ ID NO: 49967 - protein, 9 aa, Artificial Sequence
  Peptide Derived from Human Papillomavirus
VTGQNTRPL

SEQ ID NO: 49968 - protein, 9 aa, Artificial Sequence
  Peptide Derived from Human Papillomavirus
LIKPATLYA

SEQ ID NO: 49969 - protein, 9 aa, Artificial Sequence
  Peptide Derived from Human Papillomavirus
ISFVNSNSH

SEQ ID NO: 49970 - protein, 9 aa, Artificial Sequence
  Peptide Derived from Human Papillomavirus
VHSTQSSGG

SEQ ID NO: 49971 - protein, 9 aa, Artificial Sequence
  Peptide Derived from Human Papillomavirus
FGTFKCVTG

SEQ ID NO: 49972 - protein, 9 aa, Artificial Sequence
  Peptide Derived from Human Papillomavirus
FVETIVEKK

SEQ ID NO: 49973 - protein, 9 aa, Artificial Sequence
  Peptide Derived from Human Papillomavirus
LLQLKCPPI

SEQ ID NO: 49974 - protein, 9 aa, Artificial Sequence
  Peptide Derived from Human Papillomavirus
VNPTVAEGF

SEQ ID NO: 49975 - protein, 9 aa, Artificial Sequence
  Peptide Derived from Human Papillomavirus
LQGAIISFV

SEQ ID NO: 49976 - protein, 9 aa, Artificial Sequence
  Peptide Derived from Human Papillomavirus
FVNSNSHFW

SEQ ID NO: 49977 - protein, 9 aa, Artificial Sequence
  Peptide Derived from Human Papillomavirus
LLRYKCGKN

SEQ ID NO: 49978 - protein, 9 aa, Artificial Sequence
  Peptide Derived from Human Papillomavirus
YGPANTGKS

SEQ ID NO: 49979 - protein, 9 aa, Artificial Sequence
  Peptide Derived from Human Papillomavirus
VSGDTPEWI

SEQ ID NO: 49980 - protein, 9 aa, Artificial Sequence
  Peptide Derived from Human Papillomavirus
LSFTDLVRN

SEQ ID NO: 49981 - protein, 9 aa, Artificial Sequence
  Peptide Derived from Human Papillomavirus
FERTWSRLD

SEQ ID NO: 49982 - protein, 9 aa, Artificial Sequence
  Peptide Derived from Human Papillomavirus
YGLSFTDLV

SEQ ID NO: 49983 - protein, 9 aa, Artificial Sequence
  Peptide Derived from Human Papillomavirus
ILLYGPANT

SEQ ID NO: 49984 - protein, 9 aa, Artificial Sequence
  Peptide Derived from Human Papillomavirus
LQLKCPPIL

SEQ ID NO: 49985 - protein, 9 aa, Artificial Sequence
  Peptide Derived from Human Papillomavirus
FGMSFIHFL

SEQ ID NO: 49986 - protein, 9 aa, Artificial Sequence
  Peptide Derived from Human Papillomavirus
IKPATLYAH

SEQ ID NO: 49987 - protein, 9 aa, Artificial Sequence
  Peptide Derived from Human Papillomavirus
MLDDATHTC

SEQ ID NO: 49988 - protein, 9 aa, Artificial Sequence
  Peptide Derived from Human Papillomavirus
VLILALLRY

SEQ ID NO: 49989 - protein, 9 aa, Artificial Sequence
  Peptide Derived from Human Papillomavirus
YLESRVTVF

SEQ ID NO: 49990 - protein, 9 aa, Artificial Sequence
  Peptide Derived from Human Papillomavirus
LADTKVAML

SEQ ID NO: 49991 - protein, 9 aa, Artificial Sequence
  Peptide Derived from Human Papillomavirus
LKRKFAGGS

SEQ ID NO: 49992 - protein, 9 aa, Artificial Sequence
  Peptide Derived from Human Papillomavirus
FLKGTPKKN

SEQ ID NO: 49993 - protein, 9 aa, Artificial Sequence
  Peptide Derived from Human Papillomavirus
VPETCMLIE

SEQ ID NO: 49994 - protein, 9 aa, Artificial Sequence
  Peptide Derived from Human Papillomavirus
LKCPPILLT

SEQ ID NO: 49995 - protein, 9 aa, Artificial Sequence
  Peptide Derived from Human Papillomavirus
YRTGISNIS

SEQ ID NO: 49996 - protein, 9 aa, Artificial Sequence
  Peptide Derived from Human Papillomavirus
FGVNPTVAE

SEQ ID NO: 49997 - protein, 9 aa, Artificial Sequence
  Peptide Derived from Human Papillomavirus
WIKYRCSKI

SEQ ID NO: 49998 - protein, 9 aa, Artificial Sequence
  Peptide Derived from Human Papillomavirus
FIDTQLSIC

SEQ ID NO: 49999 - protein, 9 aa, Artificial Sequence
  Peptide Derived from Human Papillomavirus
LLYGPANTG

SEQ ID NO: 50000 - protein, 9 aa, Artificial Sequence
  Peptide Derived from Human Papillomavirus
FFVETIVEK

SEQ ID NO: 50001 - protein, 9 aa, Artificial Sequence
  Peptide Derived from Human Papillomavirus
FWLEPLADT

SEQ ID NO: 50002 - protein, 9 aa, Artificial Sequence
  Peptide Derived from Human Papillomavirus
LGEQLSVDT

SEQ ID NO: 50003 - protein, 9 aa, Artificial Sequence
  Peptide Derived from Human Papillomavirus
IQRLTIIQH

SEQ ID NO: 50004 - protein, 9 aa, Artificial Sequence
  Peptide Derived from Human Papillomavirus
LLTSNIDPA

SEQ ID NO: 50005 - protein, 9 aa, Artificial Sequence
  Peptide Derived from Human Papillomavirus
LRSSVAALY

SEQ ID NO: 50006 - protein, 9 aa, Artificial Sequence
  Peptide Derived from Human Papillomavirus
YLKDCAVMC

SEQ ID NO: 50007 - protein, 9 aa, Artificial Sequence
  Peptide Derived from Human Papillomavirus
FHAQEVQND

SEQ ID NO: 50008 - protein, 9 aa, Artificial Sequence
  Peptide Derived from Human Papillomavirus
VDTDLSPRL

SEQ ID NO: 50009 - protein, 9 aa, Artificial Sequence
  Peptide Derived from Human Papillomavirus
FDNDLTDES

SEQ ID NO: 50010 - protein, 9 aa, Artificial Sequence
  Peptide Derived from Human Papillomavirus
IIQHGIDDS

SEQ ID NO: 50011 - protein, 9 aa, Artificial Sequence
  Peptide Derived from Human Papillomavirus
VAKGLSTLL

SEQ ID NO: 50012 - protein, 9 aa, Artificial Sequence
  Peptide Derived from Human Papillomavirus
LDGNPISID

SEQ ID NO: 50013 - protein, 9 aa, Artificial Sequence
  Peptide Derived from Human Papillomavirus
FTISDSGYG

SEQ ID NO: 50014 - protein, 9 aa, Artificial Sequence
  Peptide Derived from Human Papillomavirus
VDFIDTQLS

SEQ ID NO: 50015 - protein, 9 aa, Artificial Sequence
  Peptide Derived from Human Papillomavirus
WLEPLADTK

SEQ ID NO: 50016 - protein, 9 aa, Artificial Sequence
  Peptide Derived from Human Papillomavirus
LQEISLNSG

SEQ ID NO: 50017 - protein, 9 aa, Artificial Sequence
  Peptide Derived from Human Papillomavirus
IKYRCSKID

SEQ ID NO: 50018 - protein, 9 aa, Artificial Sequence
  Peptide Derived from Human Papillomavirus
LHVPETCML

SEQ ID NO: 50019 - protein, 9 aa, Artificial Sequence
  Peptide Derived from Human Papillomavirus
VRNFKSDKT

SEQ ID NO: 50020 - protein, 9 aa, Artificial Sequence
  Peptide Derived from Human Papillomavirus
WIQRLTIIQ

SEQ ID NO: 50021 - protein, 9 aa, Artificial Sequence
  Peptide Derived from Human Papillomavirus
LYWYRTGIS

SEQ ID NO: 50022 - protein, 9 aa, Artificial Sequence
  Peptide Derived from Human Papillomavirus
IDTQLSICE

SEQ ID NO: 50023 - protein, 9 aa, Artificial Sequence
  Peptide Derived from Human Papillomavirus
ISFLRALKE

SEQ ID NO: 50024 - protein, 9 aa, Artificial Sequence
  Peptide Derived from Human Papillomavirus
IVEKKTGDV

SEQ ID NO: 50025 - protein, 9 aa, Artificial Sequence
  Peptide Derived from Human Papillomavirus
FPHAFPFDK

SEQ ID NO: 50026 - protein, 9 aa, Artificial Sequence
  Peptide Derived from Human Papillomavirus
IFGVNPTVA

SEQ ID NO: 50027 - protein, 9 aa, Artificial Sequence
  Peptide Derived from Human Papillomavirus
LRYQGVEFI

SEQ ID NO: 50028 - protein, 9 aa, Artificial Sequence
  Peptide Derived from Human Papillomavirus
FKSDKTTCT

SEQ ID NO: 50029 - protein, 9 aa, Artificial Sequence
  Peptide Derived from Human Papillomavirus
FTFPHAFPF

SEQ ID NO: 50030 - protein, 9 aa, Artificial Sequence
  Peptide Derived from Human Papillomavirus
LILALLRYK

SEQ ID NO: 50031 - protein, 9 aa, Artificial Sequence
  Peptide Derived from Human Papillomavirus
YRCSKIDEG

SEQ ID NO: 50032 - protein, 9 aa, Artificial Sequence
  Peptide Derived from Human Papillomavirus
LESRVTVFT

SEQ ID NO: 50033 - protein, 9 aa, Artificial Sequence
  Peptide Derived from Human Papillomavirus
IQCLDCKWG

SEQ ID NO: 50034 - protein, 9 aa, Artificial Sequence
  Peptide Derived from Human Papillomavirus
LADCNSNAA

SEQ ID NO: 50035 - protein, 9 aa, Artificial Sequence
  Peptide Derived from Human Papillomavirus
MKMQTPKES

SEQ ID NO: 50036 - protein, 9 aa, Artificial Sequence
  Peptide Derived from Human Papillomavirus
VSYWGVYYI

SEQ ID NO: 50037 - protein, 9 aa, Artificial Sequence
  Peptide Derived from Human Papillomavirus
YSEISSTWH

SEQ ID NO: 50038 - protein, 9 aa, Artificial Sequence
  Peptide Derived from Human Papillomavirus
LWNTEPSQC

SEQ ID NO: 50039 - protein, 9 aa, Artificial Sequence
  Peptide Derived from Human Papillomavirus
YGNSNTWEV

SEQ ID NO: 50040 - protein, 9 aa, Artificial Sequence
  Peptide Derived from Human Papillomavirus
YVVWDSIYY

SEQ ID NO: 50041 - protein, 9 aa, Artificial Sequence
  Peptide Derived from Human Papillomavirus
VSATQIVRQ

SEQ ID NO: 50042 - protein, 9 aa, Artificial Sequence
  Peptide Derived from Human Papillomavirus
YYITETGIW

SEQ ID NO: 50043 - protein, 9 aa, Artificial Sequence
  Peptide Derived from Human Papillomavirus
WNTEPSQCF

SEQ ID NO: 50044 - protein, 9 aa, Artificial Sequence
  Peptide Derived from Human Papillomavirus
MALKGLAQS

SEQ ID NO: 50045 - protein, 9 aa, Artificial Sequence
  Peptide Derived from Human Papillomavirus
IWDKTAACV

SEQ ID NO: 50046 - protein, 9 aa, Artificial Sequence
  Peptide Derived from Human Papillomavirus
YGGNVIDCN

SEQ ID NO: 50047 - protein, 9 aa, Artificial Sequence
  Peptide Derived from Human Papillomavirus
IDCNDSMCS

SEQ ID NO: 50048 - protein, 9 aa, Artificial Sequence
  Peptide Derived from Human Papillomavirus
IELQMALKG

SEQ ID NO: 50049 - protein, 9 aa, Artificial Sequence
  Peptide Derived from Human Papillomavirus
LLCSSTSNN

SEQ ID NO: 50050 - protein, 9 aa, Artificial Sequence
  Peptide Derived from Human Papillomavirus
VPPINISKS

SEQ ID NO: 50051 - protein, 9 aa, Artificial Sequence
  Peptide Derived from Human Papillomavirus
WQLIRLENA

SEQ ID NO: 50052 - protein, 9 aa, Artificial Sequence
  Peptide Derived from Human Papillomavirus
LNHQVVPPI

SEQ ID NO: 50053 - protein, 9 aa, Artificial Sequence
  Peptide Derived from Human Papillomavirus
ITETGIWDK

SEQ ID NO: 50054 - protein, 9 aa, Artificial Sequence
  Peptide Derived from Human Papillomavirus
LSERLSALQ

SEQ ID NO: 50055 - protein, 9 aa, Artificial Sequence
  Peptide Derived from Human Papillomavirus
IQTPATKRP

SEQ ID NO: 50056 - protein, 9 aa, Artificial Sequence
  Peptide Derived from Human Papillomavirus
VTIPNSVQI

SEQ ID NO: 50057 - protein, 9 aa, Artificial Sequence
  Peptide Derived from Human Papillomavirus
LENAILFTA

SEQ ID NO: 50058 - protein, 9 aa, Artificial Sequence
  Peptide Derived from Human Papillomavirus
YADHYSEIS

SEQ ID NO: 50059 - protein, 9 aa, Artificial Sequence
  Peptide Derived from Human Papillomavirus
LQDKILDHY

SEQ ID NO: 50060 - protein, 9 aa, Artificial Sequence
  Peptide Derived from Human Papillomavirus
VVWDSIYYI

SEQ ID NO: 50061 - protein, 9 aa, Artificial Sequence
  Peptide Derived from Human Papillomavirus
WTLQDTCEE

SEQ ID NO: 50062 - protein, 9 aa, Artificial Sequence
  Peptide Derived from Human Papillomavirus
LCSSTSNNK

SEQ ID NO: 50063 - protein, 9 aa, Artificial Sequence
  Peptide Derived from Human Papillomavirus
ISYWQLIRL

SEQ ID NO: 50064 - protein, 9 aa, Artificial Sequence
  Peptide Derived from Human Papillomavirus
LDVVTIPNS

SEQ ID NO: 50065 - protein, 9 aa, Artificial Sequence
  Peptide Derived from Human Papillomavirus
VHNPLLCSS

SEQ ID NO: 50066 - protein, 9 aa, Artificial Sequence
  Peptide Derived from Human Papillomavirus
ISKSKAHKA

SEQ ID NO: 50067 - protein, 9 aa, Artificial Sequence
  Peptide Derived from Human Papillomavirus
FLDVVTIPN

SEQ ID NO: 50068 - protein, 9 aa, Artificial Sequence
  Peptide Derived from Human Papillomavirus
VCSGNTTPI

SEQ ID NO: 50069 - protein, 9 aa, Artificial Sequence
  Peptide Derived from Human Papillomavirus
INSQISYWQ

SEQ ID NO: 50070 - protein, 9 aa, Artificial Sequence
  Peptide Derived from Human Papillomavirus
WHWTGCNKN

SEQ ID NO: 50071 - protein, 9 aa, Artificial Sequence
  Peptide Derived from Human Papillomavirus
VGTPKPHIQ

SEQ ID NO: 50072 - protein, 9 aa, Artificial Sequence
  Peptide Derived from Human Papillomavirus
WDKTAACVS

SEQ ID NO: 50073 - protein, 9 aa, Artificial Sequence
  Peptide Derived from Human Papillomavirus
YVQFKSECE

SEQ ID NO: 50074 - protein, 9 aa, Artificial Sequence
  Peptide Derived from Human Papillomavirus
INISKSKAH

SEQ ID NO: 50075 - protein, 9 aa, Artificial Sequence
  Peptide Derived from Human Papillomavirus
LQHASTSTP

SEQ ID NO: 50076 - protein, 9 aa, Artificial Sequence
  Peptide Derived from Human Papillomavirus
WGVYYIKDG

SEQ ID NO: 50077 - protein, 9 aa, Artificial Sequence
  Peptide Derived from Human Papillomavirus
IKDGDTTYY

SEQ ID NO: 50078 - protein, 9 aa, Artificial Sequence
  Peptide Derived from Human Papillomavirus
IRLENAILF

SEQ ID NO: 50079 - protein, 9 aa, Artificial Sequence
  Peptide Derived from Human Papillomavirus
YCKATLERT

SEQ ID NO: 50080 - protein, 9 aa, Artificial Sequence
  Peptide Derived from Human Papillomavirus
IVYRDCIAY

SEQ ID NO: 50081 - protein, 9 aa, Artificial Sequence
  Peptide Derived from Human Papillomavirus
IACVYCKAT

SEQ ID NO: 50082 - protein, 9 aa, Artificial Sequence
  Peptide Derived from Human Papillomavirus
YYSNSVYGE

SEQ ID NO: 50083 - protein, 9 aa, Artificial Sequence
  Peptide Derived from Human Papillomavirus
YRDCIAYAA

SEQ ID NO: 50084 - protein, 9 aa, Artificial Sequence
  Peptide Derived from Human Papillomavirus
VYCKATLER

SEQ ID NO: 50085 - protein, 9 aa, Artificial Sequence
  Peptide Derived from Human Papillomavirus
LRCQKPLNP

SEQ ID NO: 50086 - protein, 9 aa, Artificial Sequence
  Peptide Derived from Human Papillomavirus
LERTEVYQF

SEQ ID NO: 50087 - protein, 9 aa, Artificial Sequence
  Peptide Derived from Human Papillomavirus
ITNTELYNL

SEQ ID NO: 50088 - protein, 9 aa, Artificial Sequence
  Peptide Derived from Human Papillomavirus
VYRDCIAYA

SEQ ID NO: 50089 - protein, 9 aa, Artificial Sequence
  Peptide Derived from Human Papillomavirus
VSIACVYCK

SEQ ID NO: 50090 - protein, 9 aa, Artificial Sequence
  Peptide Derived from Human Papillomavirus
LLIRCLRCQ

SEQ ID NO: 50091 - protein, 9 aa, Artificial Sequence
  Peptide Derived from Human Papillomavirus
IRCLRCQKP

SEQ ID NO: 50092 - protein, 9 aa, Artificial Sequence
  Peptide Derived from Human Papillomavirus
LYNLLIRCL

SEQ ID NO: 50093 - protein, 9 aa, Artificial Sequence
  Peptide Derived from Human Papillomavirus
LQDVSIACV

SEQ ID NO: 50094 - protein, 9 aa, Artificial Sequence
  Peptide Derived from Human Papillomavirus
LPDLCTELN

SEQ ID NO: 50095 - protein, 9 aa, Artificial Sequence
  Peptide Derived from Human Papillomavirus
FKDLFIVYR

SEQ ID NO: 50096 - protein, 9 aa, Artificial Sequence
  Peptide Derived from Human Papillomavirus
YKLPDLCTE

SEQ ID NO: 50097 - protein, 9 aa, Artificial Sequence
  Peptide Derived from Human Papillomavirus
IAYAACHKC

SEQ ID NO: 50098 - protein, 9 aa, Artificial Sequence
  Peptide Derived from Human Papillomavirus
VYGETLEKI

SEQ ID NO: 50099 - protein, 9 aa, Artificial Sequence
  Peptide Derived from Human Papillomavirus
FAFKDLFIV

SEQ ID NO: 50100 - protein, 9 aa, Artificial Sequence
  Peptide Derived from Human Papillomavirus
MHGPRATLQ

SEQ ID NO: 50101 - protein, 9 aa, Artificial Sequence
  Peptide Derived from Human Papillomavirus
VSHAQLPAR

SEQ ID NO: 50102 - protein, 9 aa, Artificial Sequence
  Peptide Derived from Human Papillomavirus
LPARRAEPQ

SEQ ID NO: 50103 - protein, 9 aa, Artificial Sequence
  Peptide Derived from Human Papillomavirus
LFLSTLSFV

SEQ ID NO: 50104 - protein, 9 aa, Artificial Sequence
  Peptide Derived from Human Papillomavirus
LQQLFLSTL

SEQ ID NO: 50105 - protein, 9 aa, Artificial Sequence
  Peptide Derived from Human Papillomavirus
VCPWCATNQ

SEQ ID NO: 50106 - protein, 9 aa, Artificial Sequence
  Peptide Derived from Human Papillomavirus
LSFVCPWCA

SEQ ID NO: 50107 - protein, 9 aa, Artificial Sequence
  Peptide Derived from Human Papillomavirus
VLHLEPQNE

SEQ ID NO: 50108 - protein, 9 aa, Artificial Sequence
  Peptide Derived from Human Papillomavirus
LDPVDLLCY

SEQ ID NO: 50109 - protein, 9 aa, Artificial Sequence
  Peptide Derived from Human Papillomavirus
FLSTLSFVC

SEQ ID NO: 50110 - protein, 9 aa, Artificial Sequence
  Peptide Derived from Human Papillomavirus
LQEIVLHLE

SEQ ID NO: 50111 - protein, 9 aa, Artificial Sequence
  Peptide Derived from Human Papillomavirus
ILCVCCKCD

SEQ ID NO: 50112 - protein, 9 aa, Artificial Sequence
  Peptide Derived from Human Papillomavirus
LTVESSADD

SEQ ID NO: 50113 - protein, 9 aa, Artificial Sequence
  Peptide Derived from Human Papillomavirus
FVCPWCATN

SEQ ID NO: 50114 - protein, 9 aa, Artificial Sequence
  Peptide Derived from Human Papillomavirus
LCYEQLSES

SEQ ID NO: 50115 - protein, 9 aa, Artificial Sequence
  Peptide Derived from Human Papillomavirus
MAHNIIYGH

SEQ ID NO: 50116 - protein, 9 aa, Artificial Sequence
  Peptide Derived from Human Papillomavirus
MSYIHSMNS

SEQ ID NO: 50117 - protein, 9 aa, Artificial Sequence
  Peptide Derived from Human Papillomavirus
MGDTVPTDL

SEQ ID NO: 50118 - protein, 9 aa, Artificial Sequence
  Peptide Derived from Human Papillomavirus
VITQDVRDN

SEQ ID NO: 50119 - protein, 9 aa, Artificial Sequence
  Peptide Derived from Human Papillomavirus
YRVFRVALP

SEQ ID NO: 50120 - protein, 9 aa, Artificial Sequence
  Peptide Derived from Human Papillomavirus
LELKNTIIE

SEQ ID NO: 50121 - protein, 9 aa, Artificial Sequence
  Peptide Derived from Human Papillomavirus
VSRTSIFYH

SEQ ID NO: 50122 - protein, 9 aa, Artificial Sequence
  Peptide Derived from Human Papillomavirus
FIFQLCTIT

SEQ ID NO: 50123 - protein, 9 aa, Artificial Sequence
  Peptide Derived from Human Papillomavirus
IKGTSANMR

SEQ ID NO: 50124 - protein, 9 aa, Artificial Sequence
  Peptide Derived from Human Papillomavirus
IYNPETQRL

SEQ ID NO: 50125 - protein, 9 aa, Artificial Sequence
  Peptide Derived from Human Papillomavirus
VYLPPPSVA

SEQ ID NO: 50126 - protein, 9 aa, Artificial Sequence
  Peptide Derived from Human Papillomavirus
LDICQSICK

SEQ ID NO: 50127 - protein, 9 aa, Artificial Sequence
  Peptide Derived from Human Papillomavirus
LRREQLFAR

SEQ ID NO: 50128 - protein, 9 aa, Artificial Sequence
  Peptide Derived from Human Papillomavirus
MALWRPSDS

SEQ ID NO: 50129 - protein, 9 aa, Artificial Sequence
  Peptide Derived from Human Papillomavirus
FLQMALWRP

SEQ ID NO: 50130 - protein, 9 aa, Artificial Sequence
  Peptide Derived from Human Papillomavirus
LQDTKCEVP

SEQ ID NO: 50131 - protein, 9 aa, Artificial Sequence
  Peptide Derived from Human Papillomavirus
WAKGTLCKP

SEQ ID NO: 50132 - protein, 9 aa, Artificial Sequence
  Peptide Derived from Human Papillomavirus
IFLKNVNVF

SEQ ID NO: 50133 - protein, 9 aa, Artificial Sequence
  Peptide Derived from Human Papillomavirus
IGRGQPLGI

SEQ ID NO: 50134 - protein, 9 aa, Artificial Sequence
  Peptide Derived from Human Papillomavirus
YFRVVPSGA

SEQ ID NO: 50135 - protein, 9 aa, Artificial Sequence
  Peptide Derived from Human Papillomavirus
LGIGLSGHP

SEQ ID NO: 50136 - protein, 9 aa, Artificial Sequence
  Peptide Derived from Human Papillomavirus
VYSPSPSGS

SEQ ID NO: 50137 - protein, 9 aa, Artificial Sequence
  Peptide Derived from Human Papillomavirus
IYGHGIIIF

SEQ ID NO: 50138 - protein, 9 aa, Artificial Sequence
  Peptide Derived from Human Papillomavirus
LFVTVVDTT

SEQ ID NO: 50139 - protein, 9 aa, Artificial Sequence
  Peptide Derived from Human Papillomavirus
LCTITLTAE

SEQ ID NO: 50140 - protein, 9 aa, Artificial Sequence
  Peptide Derived from Human Papillomavirus
MNSSILENW

SEQ ID NO: 50141 - protein, 9 aa, Artificial Sequence
  Peptide Derived from Human Papillomavirus
LKNVNVFPI

SEQ ID NO: 50142 - protein, 9 aa, Artificial Sequence
  Peptide Derived from Human Papillomavirus
VPLDICQSI

SEQ ID NO: 50143 - protein, 9 aa, Artificial Sequence
  Peptide Derived from Human Papillomavirus
LPDSTIYNP

SEQ ID NO: 50144 - protein, 9 aa, Artificial Sequence
  Peptide Derived from Human Papillomavirus
FWTVDLKEK

SEQ ID NO: 50145 - protein, 9 aa, Artificial Sequence
  Peptide Derived from Human Papillomavirus
VPKVSAYQY

SEQ ID NO: 50146 - protein, 9 aa, Artificial Sequence
  Peptide Derived from Human Papillomavirus
LGCVPAIGE

SEQ ID NO: 50147 - protein, 9 aa, Artificial Sequence
  Peptide Derived from Human Papillomavirus
WNFGVPPPP

SEQ ID NO: 50148 - protein, 9 aa, Artificial Sequence
  Peptide Derived from Human Papillomavirus
VNVFPIFLQ

SEQ ID NO: 50149 - protein, 9 aa, Artificial Sequence
  Peptide Derived from Human Papillomavirus
IFQLCTITL

SEQ ID NO: 50150 - protein, 9 aa, Artificial Sequence
  Peptide Derived from Human Papillomavirus
WRPSDSTVY

SEQ ID NO: 50151 - protein, 9 aa, Artificial Sequence
  Peptide Derived from Human Papillomavirus
IHSMNSSIL

SEQ ID NO: 50152 - protein, 9 aa, Artificial Sequence
  Peptide Derived from Human Papillomavirus
VPPPPTTSL

SEQ ID NO: 50153 - protein, 9 aa, Artificial Sequence
  Peptide Derived from Human Papillomavirus
YGHGIIIFL

SEQ ID NO: 50154 - protein, 9 aa, Artificial Sequence
  Peptide Derived from Human Papillomavirus
YWLHKAQGH

SEQ ID NO: 50155 - protein, 9 aa, Artificial Sequence
  Peptide Derived from Human Papillomavirus
FRVVPSGAG

SEQ ID NO: 50156 - protein, 9 aa, Artificial Sequence
  Peptide Derived from Human Papillomavirus
IEDGDMVDT

SEQ ID NO: 50157 - protein, 9 aa, Artificial Sequence
  Peptide Derived from Human Papillomavirus
VFPIFLQMA

SEQ ID NO: 50158 - protein, 9 aa, Artificial Sequence
  Peptide Derived from Human Papillomavirus
VDYKQTQLC

SEQ ID NO: 50159 - protein, 9 aa, Artificial Sequence
  Peptide Derived from Human Papillomavirus
FGVPPPPTT

SEQ ID NO: 50160 - protein, 9 aa, Artificial Sequence
  Peptide Derived from Human Papillomavirus
LQPGDCPPL

SEQ ID NO: 50161 - protein, 9 aa, Artificial Sequence
  Peptide Derived from Human Papillomavirus
ICQSICKYP

SEQ ID NO: 50162 - protein, 9 aa, Artificial Sequence
  Peptide Derived from Human Papillomavirus
LKNTIIEDG

SEQ ID NO: 50163 - protein, 9 aa, Artificial Sequence
  Peptide Derived from Human Papillomavirus
FGLPDSTIY

SEQ ID NO: 50164 - protein, 9 aa, Artificial Sequence
  Peptide Derived from Human Papillomavirus
LYIKGTSAN

SEQ ID NO: 50165 - protein, 9 aa, Artificial Sequence
  Peptide Derived from Human Papillomavirus
LRRRPTIGP

SEQ ID NO: 50166 - protein, 9 aa, Artificial Sequence
  Peptide Derived from Human Papillomavirus
FQLCTITLT

SEQ ID NO: 50167 - protein, 9 aa, Artificial Sequence
  Peptide Derived from Human Papillomavirus
ILGCVPAIG

SEQ ID NO: 50168 - protein, 9 aa, Artificial Sequence
  Peptide Derived from Human Papillomavirus
VTVVDTTRS

SEQ ID NO: 50169 - protein, 9 aa, Artificial Sequence
  Peptide Derived from Human Papillomavirus
LCILGCVPA

SEQ ID NO: 50170 - protein, 9 aa, Artificial Sequence
  Peptide Derived from Human Papillomavirus
LGRKFLVQA

SEQ ID NO: 50171 - protein, 9 aa, Artificial Sequence
  Peptide Derived from Human Papillomavirus
VFRVALPDP

SEQ ID NO: 50172 - protein, 9 aa, Artificial Sequence
  Peptide Derived from Human Papillomavirus
VMGDTVPTD

SEQ ID NO: 50173 - protein, 9 aa, Artificial Sequence
  Peptide Derived from Human Papillomavirus
WNRAGVMGD

SEQ ID NO: 50174 - protein, 9 aa, Artificial Sequence
  Peptide Derived from Human Papillomavirus
LVQAGLRRR

SEQ ID NO: 50175 - protein, 9 aa, Artificial Sequence
  Peptide Derived from Human Papillomavirus
WACVGMEIG

SEQ ID NO: 50176 - protein, 9 aa, Artificial Sequence
  Peptide Derived from Human Papillomavirus
YSPSPSGSI

SEQ ID NO: 50177 - protein, 9 aa, Artificial Sequence
  Peptide Derived from Human Papillomavirus
ITTSDSQLF

SEQ ID NO: 50178 - protein, 9 aa, Artificial Sequence
  Peptide Derived from Human Papillomavirus
YHAGSSRLL

SEQ ID NO: 50179 - protein, 9 aa, Artificial Sequence
  Peptide Derived from Human Papillomavirus
VEEYDLQFI

SEQ ID NO: 50180 - protein, 9 aa, Artificial Sequence
  Peptide Derived from Human Papillomavirus
LTVGNPYFR

SEQ ID NO: 50181 - protein, 9 aa, Artificial Sequence
  Peptide Derived from Human Papillomavirus
LDQYPLGRK

SEQ ID NO: 50182 - protein, 9 aa, Artificial Sequence
  Peptide Derived from Human Papillomavirus
LTLCASTQN

SEQ ID NO: 50183 - protein, 9 aa, Artificial Sequence
  Peptide Derived from Human Papillomavirus
YLPPPSVAR

SEQ ID NO: 50184 - protein, 9 aa, Artificial Sequence
  Peptide Derived from Human Papillomavirus
YKQTQLCIL

SEQ ID NO: 50185 - protein, 9 aa, Artificial Sequence
  Peptide Derived from Human Papillomavirus
YVSRTSIFY

SEQ ID NO: 50186 - protein, 9 aa, Artificial Sequence
  Peptide Derived from Human Papillomavirus
YIKGTSANM

SEQ ID NO: 50187 - protein, 9 aa, Artificial Sequence
  Peptide Derived from Human Papillomavirus
LTAEVMSYI

SEQ ID NO: 50188 - protein, 9 aa, Artificial Sequence
  Peptide Derived from Human Papillomavirus
VRDNVSVDY

SEQ ID NO: 50189 - protein, 9 aa, Artificial Sequence
  Peptide Derived from Human Papillomavirus
LVWACVGME

SEQ ID NO: 50190 - protein, 9 aa, Artificial Sequence
  Peptide Derived from Human Papillomavirus
FYHAGSSRL

SEQ ID NO: 50191 - protein, 9 aa, Artificial Sequence
  Peptide Derived from Human Papillomavirus
LKEKFSSDL

SEQ ID NO: 50192 - protein, 9 aa, Artificial Sequence
  Peptide Derived from Human Papillomavirus
LPPPSVARV

SEQ ID NO: 50193 - protein, 9 aa, Artificial Sequence
  Peptide Derived from Human Papillomavirus
FVQSVAVTC

SEQ ID NO: 50194 - protein, 9 aa, Artificial Sequence
  Peptide Derived from Human Papillomavirus
YRFVQSVAV

SEQ ID NO: 50195 - protein, 9 aa, Artificial Sequence
  Peptide Derived from Human Papillomavirus
YDLQFIFQL

SEQ ID NO: 50196 - protein, 9 aa, Artificial Sequence
  Peptide Derived from Human Papillomavirus
IFLQMALWR

SEQ ID NO: 50197 - protein, 9 aa, Artificial Sequence
  Peptide Derived from Human Papillomavirus
VALPDPNKF

SEQ ID NO: 50198 - protein, 9 aa, Artificial Sequence
  Peptide Derived from Human Papillomavirus
IGEHWAKGT

SEQ ID NO: 50199 - protein, 9 aa, Artificial Sequence
  Peptide Derived from Human Papillomavirus
VDTTRSTNL

SEQ ID NO: 50200 - protein, 9 aa, Artificial Sequence
  Peptide Derived from Human Papillomavirus
LKFWTVDLK

SEQ ID NO: 50201 - protein, 9 aa, Artificial Sequence
  Peptide Derived from Human Papillomavirus
VVPSGAGNK

SEQ ID NO: 50202 - protein, 9 aa, Artificial Sequence
  Peptide Derived from Human Papillomavirus
MDFSTLQDT

SEQ ID NO: 50203 - protein, 9 aa, Artificial Sequence
  Peptide Derived from Human Papillomavirus
LDDTESAHA

SEQ ID NO: 50204 - protein, 9 aa, Artificial Sequence
  Peptide Derived from Human Papillomavirus
YLQMSADPY

SEQ ID NO: 50205 - protein, 9 aa, Artificial Sequence
  Peptide Derived from Human Papillomavirus
VQSVAVTCQ

SEQ ID NO: 50206 - protein, 9 aa, Artificial Sequence
  Peptide Derived from Human Papillomavirus
FRVALPDPN

SEQ ID NO: 50207 - protein, 9 aa, Artificial Sequence
  Peptide Derived from Human Papillomavirus
MVSHRAARR

SEQ ID NO: 50208 - protein, 9 aa, Artificial Sequence
  Peptide Derived from Human Papillomavirus
VSHRAARRK

SEQ ID NO: 50209 - protein, 9 aa, Artificial Sequence
  Peptide Derived from Human Papillomavirus
ILQWSSLGI

SEQ ID NO: 50210 - protein, 9 aa, Artificial Sequence
  Peptide Derived from Human Papillomavirus
YSNVTVPLT

SEQ ID NO: 50211 - protein, 9 aa, Artificial Sequence
  Peptide Derived from Human Papillomavirus
LPSHTPMWP

SEQ ID NO: 50212 - protein, 9 aa, Artificial Sequence
  Peptide Derived from Human Papillomavirus
LQWSSLGIF

SEQ ID NO: 50213 - protein, 9 aa, Artificial Sequence
  Peptide Derived from Human Papillomavirus
LFDVYADFP

SEQ ID NO: 50214 - protein, 9 aa, Artificial Sequence
  Peptide Derived from Human Papillomavirus
VVASGAPVP

SEQ ID NO: 50215 - protein, 9 aa, Artificial Sequence
  Peptide Derived from Human Papillomavirus
LSFEPTSNV

SEQ ID NO: 50216 - protein, 9 aa, Artificial Sequence
  Peptide Derived from Human Papillomavirus
LQPLISATN

SEQ ID NO: 50217 - protein, 9 aa, Artificial Sequence
  Peptide Derived from Human Papillomavirus
LQTFASSGS

SEQ ID NO: 50218 - protein, 9 aa, Artificial Sequence
  Peptide Derived from Human Papillomavirus
YADFPPPAS

SEQ ID NO: 50219 - protein, 9 aa, Artificial Sequence
  Peptide Derived from Human Papillomavirus
LGQRATMFT

SEQ ID NO: 50220 - protein, 9 aa, Artificial Sequence
  Peptide Derived from Human Papillomavirus
ITSSGTTTP

SEQ ID NO: 50221 - protein, 9 aa, Artificial Sequence
  Peptide Derived from Human Papillomavirus
LGGLGIGTG

SEQ ID NO: 50222 - protein, 9 aa, Artificial Sequence
  Peptide Derived from Human Papillomavirus
FVGTPTSGS

SEQ ID NO: 50223 - protein, 9 aa, Artificial Sequence
  Peptide Derived from Human Papillomavirus
LADKILQWS

SEQ ID NO: 50224 - protein, 9 aa, Artificial Sequence
  Peptide Derived from Human Papillomavirus
MWPSTSPTN

SEQ ID NO: 50225 - protein, 9 aa, Artificial Sequence
  Peptide Derived from Human Papillomavirus
VGPTDPSIV

SEQ ID NO: 50226 - protein, 9 aa, Artificial Sequence
  Peptide Derived from Human Papillomavirus
LHRPALSSR

SEQ ID NO: 50227 - protein, 9 aa, Artificial Sequence
  Peptide Derived from Human Papillomavirus
WSSLGIFLG

SEQ ID NO: 50228 - protein, 9 aa, Artificial Sequence
  Peptide Derived from Human Papillomavirus
VEGTTLADK

SEQ ID NO: 50229 - protein, 9 aa, Artificial Sequence
  Peptide Derived from Human Papillomavirus
LVEDSSVVA

SEQ ID NO: 50230 - protein, 9 aa, Artificial Sequence
  Peptide Derived from Human Papillomavirus
LTMPSTAAS

SEQ ID NO: 50231 - protein, 9 aa, Artificial Sequence
  Peptide Derived from Human Papillomavirus
VYADFPPPA

SEQ ID NO: 50232 - protein, 9 aa, Artificial Sequence
  Peptide Derived from Human Papillomavirus
FASSGSGTE

SEQ ID NO: 50233 - protein, 9 aa, Artificial Sequence
  Peptide Derived from Human Papillomavirus
WYYYFPKKR

SEQ ID NO: 50234 - protein, 9 aa, Artificial Sequence
  Peptide Derived from Human Papillomavirus
IRLHRPALS

SEQ ID NO: 50235 - protein, 9 aa, Artificial Sequence
  Peptide Derived from Human Papillomavirus
VGTPTSGSH

SEQ ID NO: 50236 - protein, 9 aa, Artificial Sequence
  Peptide Derived from Human Papillomavirus
FSDPSIIEV

SEQ ID NO: 50237 - protein, 9 aa, Artificial Sequence
  Peptide Derived from Human Papillomavirus
YEPLDTTLS

SEQ ID NO: 50238 - protein, 9 aa, Artificial Sequence
  Peptide Derived from Human Papillomavirus
VRVSTSQFL

SEQ ID NO: 50239 - protein, 9 aa, Artificial Sequence
  Peptide Derived from Human Papillomavirus
VDVGPTRPP

SEQ ID NO: 50240 - protein, 9 aa, Artificial Sequence
  Peptide Derived from Human Papillomavirus
VPLTSAWDV

SEQ ID NO: 50241 - protein, 9 aa, Artificial Sequence
  Peptide Derived from Human Papillomavirus
LDITPTVDS

SEQ ID NO: 50242 - protein, 9 aa, Artificial Sequence
  Peptide Derived from Human Papillomavirus
ILPSHTPMW

SEQ ID NO: 50243 - protein, 9 aa, Artificial Sequence
  Peptide Derived from Human Papillomavirus
IEVPQTGEV

SEQ ID NO: 50244 - protein, 9 aa, Artificial Sequence
  Peptide Derived from Human Papillomavirus
IHKSFTYPK

SEQ ID NO: 50245 - protein, 9 aa, Artificial Sequence
  Peptide Derived from Human Papillomavirus
IEPVGPTDP

SEQ ID NO: 50246 - protein, 9 aa, Artificial Sequence
  Peptide Derived from Human Papillomavirus
VRFSRLGQR

SEQ ID NO: 50247 - protein, 9 aa, Artificial Sequence
  Peptide Derived from Human Papillomavirus
IPYFFADGF

SEQ ID NO: 50248 - protein, 9 aa, Artificial Sequence
  Peptide Derived from Human Papillomavirus
VVIEPVGPT

SEQ ID NO: 50249 - protein, 9 aa, Artificial Sequence
  Peptide Derived from Human Papillomavirus
FYHDISPIA

SEQ ID NO: 50250 - protein, 9 aa, Artificial Sequence
  Peptide Derived from Human Papillomavirus
MDIIRLHRP

SEQ ID NO: 50251 - protein, 9 aa, Artificial Sequence
  Peptide Derived from Human Papillomavirus
YPKYSLTMP

SEQ ID NO: 50252 - protein, 9 aa, Artificial Sequence
  Peptide Derived from Human Papillomavirus
IFVGTPTSG

SEQ ID NO: 50253 - protein, 9 aa, Artificial Sequence
  Peptide Derived from Human Papillomavirus
YEEIPLQTF

SEQ ID NO: 50254 - protein, 9 aa, Artificial Sequence
  Peptide Derived from Human Papillomavirus
IFLGGLGIG

SEQ ID NO: 50255 - protein, 9 aa, Artificial Sequence
  Peptide Derived from Human Papillomavirus
MPSTAASSY

SEQ ID NO: 50256 - protein, 9 aa, Artificial Sequence
  Peptide Derived from Human Papillomavirus
VVDVGPTRP

SEQ ID NO: 50257 - protein, 9 aa, Artificial Sequence
  Peptide Derived from Human Papillomavirus
LTHPSSLVT

SEQ ID NO: 50258 - protein, 9 aa, Artificial Sequence
  Peptide Derived from Human Papillomavirus
VTFDNPAYE

SEQ ID NO: 50259 - protein, 9 aa, Artificial Sequence
  Peptide Derived from Human Papillomavirus
VASGAPVPT

SEQ ID NO: 50260 - protein, 9 aa, Artificial Sequence
  Peptide Derived from Human Papillomavirus
IELQPLISA

SEQ ID NO: 50261 - protein, 9 aa, Artificial Sequence
  Peptide Derived from Human Papillomavirus
ISSTPLPTV

SEQ ID NO: 50262 - protein, 9 aa, Artificial Sequence
  Peptide Derived from Human Papillomavirus
VLDITPTVD

SEQ ID NO: 50263 - protein, 9 aa, Artificial Sequence
  Peptide Derived from Human Papillomavirus
WPSTSPTNA

SEQ ID NO: 50264 - protein, 9 aa, Artificial Sequence
  Peptide Derived from Human Papillomavirus
VDSVSISST

SEQ ID NO: 50265 - protein, 9 aa, Artificial Sequence
  Peptide Derived from Human Papillomavirus
FEITSSGTT

SEQ ID NO: 50266 - protein, 9 aa, Artificial Sequence
  Peptide Derived from Human Papillomavirus
FLTHPSSLV

SEQ ID NO: 50267 - protein, 9 aa, Artificial Sequence
  Peptide Derived from Human Papillomavirus
IGIHGTQYY

SEQ ID NO: 50268 - protein, 9 aa, Artificial Sequence
  Peptide Derived from Human Papillomavirus
VSISSTSFT

SEQ ID NO: 50269 - protein, 9 aa, Artificial Sequence
  Peptide Derived from Human Papillomavirus
YHDISPIAA

SEQ ID NO: 50270 - protein, 9 aa, Artificial Sequence
  Peptide Derived from Human Papillomavirus
YTGPDIILP

SEQ ID NO: 50271 - protein, 9 aa, Artificial Sequence
  Peptide Derived from Human Papillomavirus
VRGPRLYSR

SEQ ID NO: 50272 - protein, 9 aa, Artificial Sequence
  Peptide Derived from Human Papillomavirus
VEDSSVVAS

SEQ ID NO: 50273 - protein, 9 aa, Artificial Sequence
  Peptide Derived from Human Papillomavirus
VGPTRPPVV

SEQ ID NO: 50274 - protein, 9 aa, Artificial Sequence
  Peptide Derived from Human Papillomavirus
FPPPASTTP

SEQ ID NO: 50275 - protein, 9 aa, Artificial Sequence
  Peptide Derived from Human Papillomavirus
LDTTLSFEP

SEQ ID NO: 50276 - protein, 9 aa, Artificial Sequence
  Peptide Derived from Human Papillomavirus
ISPIAATEE

SEQ ID NO: 50277 - protein, 9 aa, Artificial Sequence
  Peptide Derived from Human Papillomavirus
YSLTMPSTA

SEQ ID NO: 50278 - protein, 9 aa, Artificial Sequence
  Peptide Derived from Human Papillomavirus
VTVPLTSAW

SEQ ID NO: 50279 - protein, 9 aa, Artificial Sequence
  Peptide Derived from Human Papillomavirus
VPCLQVCKA

SEQ ID NO: 50280 - protein, 9 aa, Artificial Sequence
  Peptide Derived from Human Papillomavirus
FGCKNIWEV

SEQ ID NO: 50281 - protein, 9 aa, Artificial Sequence
  Peptide Derived from Human Papillomavirus
LWLTEPKKC

SEQ ID NO: 50282 - protein, 9 aa, Artificial Sequence
  Peptide Derived from Human Papillomavirus
IWEVHMENE

SEQ ID NO: 50283 - protein, 9 aa, Artificial Sequence
  Peptide Derived from Human Papillomavirus
VCKAKACSA

SEQ ID NO: 50284 - protein, 9 aa, Artificial Sequence
  Peptide Derived from Human Papillomavirus
IEVQIALES

SEQ ID NO: 50285 - protein, 9 aa, Artificial Sequence
  Peptide Derived from Human Papillomavirus
VDYRGIYYV

SEQ ID NO: 50286 - protein, 9 aa, Artificial Sequence
  Peptide Derived from Human Papillomavirus
WQKVCSGVD

SEQ ID NO: 50287 - protein, 9 aa, Artificial Sequence
  Peptide Derived from Human Papillomavirus
YCPDSVSST

SEQ ID NO: 50288 - protein, 9 aa, Artificial Sequence
  Peptide Derived from Human Papillomavirus
MENESIYCP

SEQ ID NO: 50289 - protein, 9 aa, Artificial Sequence
  Peptide Derived from Human Papillomavirus
IALESLSTT

SEQ ID NO: 50290 - protein, 9 aa, Artificial Sequence
  Peptide Derived from Human Papillomavirus
YKTLFVDVT

SEQ ID NO: 50291 - protein, 9 aa, Artificial Sequence
  Peptide Derived from Human Papillomavirus
VWFDGSKNN

SEQ ID NO: 50292 - protein, 9 aa, Artificial Sequence
  Peptide Derived from Human Papillomavirus
IYKDETQRN

SEQ ID NO: 50293 - protein, 9 aa, Artificial Sequence
  Peptide Derived from Human Papillomavirus
VVYRLVWDK

SEQ ID NO: 50294 - protein, 9 aa, Artificial Sequence
  Peptide Derived from Human Papillomavirus
FVDVTSTYH

SEQ ID NO: 50295 - protein, 9 aa, Artificial Sequence
  Peptide Derived from Human Papillomavirus
YYNGDCGWQ

SEQ ID NO: 50296 - protein, 9 aa, Artificial Sequence
  Peptide Derived from Human Papillomavirus
VKIPVVYRL

SEQ ID NO: 50297 - protein, 9 aa, Artificial Sequence
  Peptide Derived from Human Papillomavirus
VAWKYIYYN

SEQ ID NO: 50298 - protein, 9 aa, Artificial Sequence
  Peptide Derived from Human Papillomavirus
WTLRDTCEE

SEQ ID NO: 50299 - protein, 9 aa, Artificial Sequence
  Peptide Derived from Human Papillomavirus
IYCPDSVSS

SEQ ID NO: 50300 - protein, 9 aa, Artificial Sequence
  Peptide Derived from Human Papillomavirus
YSIITIIYK

SEQ ID NO: 50301 - protein, 9 aa, Artificial Sequence
  Peptide Derived from Human Papillomavirus
LSHVKIPVV

SEQ ID NO: 50302 - protein, 9 aa, Artificial Sequence
  Peptide Derived from Human Papillomavirus
LESLSTTIY

SEQ ID NO: 50303 - protein, 9 aa, Artificial Sequence
  Peptide Derived from Human Papillomavirus
VSPVETVNE

SEQ ID NO: 50304 - protein, 9 aa, Artificial Sequence
  Peptide Derived from Human Papillomavirus
FQKYKTLFV

SEQ ID NO: 50305 - protein, 9 aa, Artificial Sequence
  Peptide Derived from Human Papillomavirus
VGNQDAAVS

SEQ ID NO: 50306 - protein, 9 aa, Artificial Sequence
  Peptide Derived from Human Papillomavirus
YNVSPVETV

SEQ ID NO: 50307 - protein, 9 aa, Artificial Sequence
  Peptide Derived from Human Papillomavirus
VDVTSTYHW

SEQ ID NO: 50308 - protein, 9 aa, Artificial Sequence
  Peptide Derived from Human Papillomavirus
YHWTSTDNK

SEQ ID NO: 50309 - protein, 9 aa, Artificial Sequence
  Peptide Derived from Human Papillomavirus
VNEYNTHKT

SEQ ID NO: 50310 - protein, 9 aa, Artificial Sequence
  Peptide Derived from Human Papillomavirus
YNTHKTTTT

SEQ ID NO: 50311 - protein, 9 aa, Artificial Sequence
  Peptide Derived from Human Papillomavirus
LQVCKAKAC

SEQ ID NO: 50312 - protein, 9 aa, Artificial Sequence
  Peptide Derived from Human Papillomavirus
LFVDVTSTY

SEQ ID NO: 50313 - protein, 9 aa, Artificial Sequence
  Peptide Derived from Human Papillomavirus
YNFACTELK

SEQ ID NO: 50314 - protein, 9 aa, Artificial Sequence
  Peptide Derived from Human Papillomavirus
WTGSCLGCW

SEQ ID NO: 50315 - protein, 9 aa, Artificial Sequence
  Peptide Derived from Human Papillomavirus
YAVCRVCLL

SEQ ID NO: 50316 - protein, 9 aa, Artificial Sequence
  Peptide Derived from Human Papillomavirus
IRCYRCQSP

SEQ ID NO: 50317 - protein, 9 aa, Artificial Sequence
  Peptide Derived from Human Papillomavirus
LSCVYCKKE

SEQ ID NO: 50318 - protein, 9 aa, Artificial Sequence
  Peptide Derived from Human Papillomavirus
VYGATLESI

SEQ ID NO: 50319 - protein, 9 aa, Artificial Sequence
  Peptide Derived from Human Papillomavirus
LIDLRLSCV

SEQ ID NO: 50320 - protein, 9 aa, Artificial Sequence
  Peptide Derived from Human Papillomavirus
IAHGWTGSC

SEQ ID NO: 50321 - protein, 9 aa, Artificial Sequence
  Peptide Derived from Human Papillomavirus
IDLRLSCVY

SEQ ID NO: 50322 - protein, 9 aa, Artificial Sequence
  Peptide Derived from Human Papillomavirus
YRCQSPLTP

SEQ ID NO: 50323 - protein, 9 aa, Artificial Sequence
  Peptide Derived from Human Papillomavirus
LTRAEVYNF

SEQ ID NO: 50324 - protein, 9 aa, Artificial Sequence
  Peptide Derived from Human Papillomavirus
LCDLLIRCY

SEQ ID NO: 50325 - protein, 9 aa, Artificial Sequence
  Peptide Derived from Human Papillomavirus
YRDDFPYAV

SEQ ID NO: 50326 - protein, 9 aa, Artificial Sequence
  Peptide Derived from Human Papillomavirus
YYDYSVYGA

SEQ ID NO: 50327 - protein, 9 aa, Artificial Sequence
  Peptide Derived from Human Papillomavirus
ITKKQLCDL

SEQ ID NO: 50328 - protein, 9 aa, Artificial Sequence
  Peptide Derived from Human Papillomavirus
LRLSCVYCK

SEQ ID NO: 50329 - protein, 9 aa, Artificial Sequence
  Peptide Derived from Human Papillomavirus
VLEIPLIDL

SEQ ID NO: 50330 - protein, 9 aa, Artificial Sequence
  Peptide Derived from Human Papillomavirus
VCRVCLLFY

SEQ ID NO: 50331 - protein, 9 aa, Artificial Sequence
  Peptide Derived from Human Papillomavirus
VYNFACTEL

SEQ ID NO: 50332 - protein, 9 aa, Artificial Sequence
  Peptide Derived from Human Papillomavirus
FPYAVCRVC

SEQ ID NO: 50333 - protein, 9 aa, Artificial Sequence
  Peptide Derived from Human Papillomavirus
YCKKELTRA

SEQ ID NO: 50334 - protein, 9 aa, Artificial Sequence
  Peptide Derived from Human Papillomavirus
LEIPLIDLR

SEQ ID NO: 50335 - protein, 9 aa, Artificial Sequence
  Peptide Derived from Human Papillomavirus
LFYSKVRKY

SEQ ID NO: 50336 - protein, 9 aa, Artificial Sequence
  Peptide Derived from Human Papillomavirus
IPLIDLRLS

SEQ ID NO: 50337 - protein, 9 aa, Artificial Sequence
  Peptide Derived from Human Papillomavirus
FACTELKLV

SEQ ID NO: 50338 - protein, 9 aa, Artificial Sequence
  Peptide Derived from Human Papillomavirus
YSVYGATLE

SEQ ID NO: 50339 - protein, 9 aa, Artificial Sequence
  Peptide Derived from Human Papillomavirus
MHGKVPTLQ

SEQ ID NO: 50340 - protein, 9 aa, Artificial Sequence
  Peptide Derived from Human Papillomavirus
VTCPLCASS

SEQ ID NO: 50341 - protein, 9 aa, Artificial Sequence
  Peptide Derived from Human Papillomavirus
VVQLDIQST

SEQ ID NO: 50342 - protein, 9 aa, Artificial Sequence
  Peptide Derived from Human Papillomavirus
IHVPCCECK

SEQ ID NO: 50343 - protein, 9 aa, Artificial Sequence
  Peptide Derived from Human Papillomavirus
VVQQLLMGA

SEQ ID NO: 50344 - protein, 9 aa, Artificial Sequence
  Peptide Derived from Human Papillomavirus
YLIHVPCCE

SEQ ID NO: 50345 - protein, 9 aa, Artificial Sequence
  Peptide Derived from Human Papillomavirus
VPCCECKFV

SEQ ID NO: 50346 - protein, 9 aa, Artificial Sequence
  Peptide Derived from Human Papillomavirus
VVLELTPQT

SEQ ID NO: 50347 - protein, 9 aa, Artificial Sequence
  Peptide Derived from Human Papillomavirus
VQQLLMGAL

SEQ ID NO: 50348 - protein, 9 aa, Artificial Sequence
  Peptide Derived from Human Papillomavirus
LTVTCPLCA

SEQ ID NO: 50349 - protein, 9 aa, Artificial Sequence
  Peptide Derived from Human Papillomavirus
VLELTPQTE

SEQ ID NO: 50350 - protein, 9 aa, Artificial Sequence
  Peptide Derived from Human Papillomavirus
MGALTVTCP

SEQ ID NO: 50351 - protein, 9 aa, Artificial Sequence
  Peptide Derived from Human Papillomavirus
LMGALTVTC

SEQ ID NO: 50352 - protein, 9 aa, Artificial Sequence
  Peptide Derived from Human Papillomavirus
LIHVPCCEC

SEQ ID NO: 50353 - protein, 9 aa, Artificial Sequence
  Peptide Derived from Human Papillomavirus
LQDVVLELT

SEQ ID NO: 50354 - protein, 9 aa, Artificial Sequence
  Peptide Derived from Human Papillomavirus
LLMGALTVT

SEQ ID NO: 50355 - protein, 9 aa, Artificial Sequence
  Peptide Derived from Human Papillomavirus
LDIQSTKED

SEQ ID NO: 50356 - protein, 9 aa, Artificial Sequence
  Peptide Derived from Human Papillomavirus
MMLPMMYIY

SEQ ID NO: 50357 - protein, 9 aa, Artificial Sequence
  Peptide Derived from Human Papillomavirus
LPMMYIYRD

SEQ ID NO: 50358 - protein, 9 aa, Artificial Sequence
  Peptide Derived from Human Papillomavirus
VGETIPAEL

SEQ ID NO: 50359 - protein, 9 aa, Artificial Sequence
  Peptide Derived from Human Papillomavirus
LEDWNIGLS

SEQ ID NO: 50360 - protein, 9 aa, Artificial Sequence
  Peptide Derived from Human Papillomavirus
VFPIFLQMA

SEQ ID NO: 50361 - protein, 9 aa, Artificial Sequence
  Peptide Derived from Human Papillomavirus
YRVFRVRLP

SEQ ID NO: 50362 - protein, 9 aa, Artificial Sequence
  Peptide Derived from Human Papillomavirus
LDVGAVNVF

SEQ ID NO: 50363 - protein, 9 aa, Artificial Sequence
  Peptide Derived from Human Papillomavirus
LALINTPIE

SEQ ID NO: 50364 - protein, 9 aa, Artificial Sequence
  Peptide Derived from Human Papillomavirus
LHYGLCIFL

SEQ ID NO: 50365 - protein, 9 aa, Artificial Sequence
  Peptide Derived from Human Papillomavirus
VKRTSIFYH

SEQ ID NO: 50366 - protein, 9 aa, Artificial Sequence
  Peptide Derived from Human Papillomavirus
LQDSFSTDL

SEQ ID NO: 50367 - protein, 9 aa, Artificial Sequence
  Peptide Derived from Human Papillomavirus
IGLSPPVAT

SEQ ID NO: 50368 - protein, 9 aa, Artificial Sequence
  Peptide Derived from Human Papillomavirus
YRYVRSTAI

SEQ ID NO: 50369 - protein, 9 aa, Artificial Sequence
  Peptide Derived from Human Papillomavirus
FVFQLCKIT

SEQ ID NO: 50370 - protein, 9 aa, Artificial Sequence
  Peptide Derived from Human Papillomavirus
VYLPPTPVS

SEQ ID NO: 50371 - protein, 9 aa, Artificial Sequence
  Peptide Derived from Human Papillomavirus
LDIVQSTCK

SEQ ID NO: 50372 - protein, 9 aa, Artificial Sequence
  Peptide Derived from Human Papillomavirus
MDFKVLQES

SEQ ID NO: 50373 - protein, 9 aa, Artificial Sequence
  Peptide Derived from Human Papillomavirus
LQESKAEVP

SEQ ID NO: 50374 - protein, 9 aa, Artificial Sequence
  Peptide Derived from Human Papillomavirus
VGAVNVFPI

SEQ ID NO: 50375 - protein, 9 aa, Artificial Sequence
  Peptide Derived from Human Papillomavirus
MATWRPSEN

SEQ ID NO: 50376 - protein, 9 aa, Artificial Sequence
  Peptide Derived from Human Papillomavirus
LDDTESSNL

SEQ ID NO: 50377 - protein, 9 aa, Artificial Sequence
  Peptide Derived from Human Papillomavirus
FLQMATWRP

SEQ ID NO: 50378 - protein, 9 aa, Artificial Sequence
  Peptide Derived from Human Papillomavirus
VNLQDSFST

SEQ ID NO: 50379 - protein, 9 aa, Artificial Sequence
  Peptide Derived from Human Papillomavirus
LSGHPLFNR

SEQ ID NO: 50380 - protein, 9 aa, Artificial Sequence
  Peptide Derived from Human Papillomavirus
WTKGAVCKS

SEQ ID NO: 50381 - protein, 9 aa, Artificial Sequence
  Peptide Derived from Human Papillomavirus
VGRGQPLGA

SEQ ID NO: 50382 - protein, 9 aa, Artificial Sequence
  Peptide Derived from Human Papillomavirus
LFVTVVDTT

SEQ ID NO: 50383 - protein, 9 aa, Artificial Sequence
  Peptide Derived from Human Papillomavirus
LGAGLSGHP

SEQ ID NO: 50384 - protein, 9 aa, Artificial Sequence
  Peptide Derived from Human Papillomavirus
VPLDIVQST

SEQ ID NO: 50385 - protein, 9 aa, Artificial Sequence
  Peptide Derived from Human Papillomavirus
LPDTNIYNP

SEQ ID NO: 50386 - protein, 9 aa, Artificial Sequence
  Peptide Derived from Human Papillomavirus
LSAEVMAYL

SEQ ID NO: 50387 - protein, 9 aa, Artificial Sequence
  Peptide Derived from Human Papillomavirus
IPKVSAYQY

SEQ ID NO: 50388 - protein, 9 aa, Artificial Sequence
  Peptide Derived from Human Papillomavirus
LPPTPVSKV

SEQ ID NO: 50389 - protein, 9 aa, Artificial Sequence
  Peptide Derived from Human Papillomavirus
FWDVNLQDS

SEQ ID NO: 50390 - protein, 9 aa, Artificial Sequence
  Peptide Derived from Human Papillomavirus
YVRSTAITC

SEQ ID NO: 50391 - protein, 9 aa, Artificial Sequence
  Peptide Derived from Human Papillomavirus
YKFWDVNLQ

SEQ ID NO: 50392 - protein, 9 aa, Artificial Sequence
  Peptide Derived from Human Papillomavirus
FLDVGAVNV

SEQ ID NO: 50393 - protein, 9 aa, Artificial Sequence
  Peptide Derived from Human Papillomavirus
VGCTPAMGE

SEQ ID NO: 50394 - protein, 9 aa, Artificial Sequence
  Peptide Derived from Human Papillomavirus
WNIGLSPPV

SEQ ID NO: 50395 - protein, 9 aa, Artificial Sequence
  Peptide Derived from Human Papillomavirus
MNANLLEDW

SEQ ID NO: 50396 - protein, 9 aa, Artificial Sequence
  Peptide Derived from Human Papillomavirus
VEEYELQFV

SEQ ID NO: 50397 - protein, 9 aa, Artificial Sequence
  Peptide Derived from Human Papillomavirus
YDARKINQY

SEQ ID NO: 50398 - protein, 9 aa, Artificial Sequence
  Peptide Derived from Human Papillomavirus
LHNMNANLL

SEQ ID NO: 50399 - protein, 9 aa, Artificial Sequence
  Peptide Derived from Human Papillomavirus
IYRDPPLHY

SEQ ID NO: 50400 - protein, 9 aa, Artificial Sequence
  Peptide Derived from Human Papillomavirus
YRDPPLHYG

SEQ ID NO: 50401 - protein, 9 aa, Artificial Sequence
  Peptide Derived from Human Papillomavirus
LSPPVATSL

SEQ ID NO: 50402 - protein, 9 aa, Artificial Sequence
  Peptide Derived from Human Papillomavirus
VDGKQTQLC

SEQ ID NO: 50403 - protein, 9 aa, Artificial Sequence
  Peptide Derived from Human Papillomavirus
YWLQRAQGH

SEQ ID NO: 50404 - protein, 9 aa, Artificial Sequence
  Peptide Derived from Human Papillomavirus
YLPPTPVSK

SEQ ID NO: 50405 - protein, 9 aa, Artificial Sequence
  Peptide Derived from Human Papillomavirus
IEDGDMIDT

SEQ ID NO: 50406 - protein, 9 aa, Artificial Sequence
  Peptide Derived from Human Papillomavirus
LYLKGSNGR

SEQ ID NO: 50407 - protein, 9 aa, Artificial Sequence
  Peptide Derived from Human Papillomavirus
LINTPIEDG

SEQ ID NO: 50408 - protein, 9 aa, Artificial Sequence
  Peptide Derived from Human Papillomavirus
IVQSTCKYP

SEQ ID NO: 50409 - protein, 9 aa, Artificial Sequence
  Peptide Derived from Human Papillomavirus
YIYRDPPLH

SEQ ID NO: 50410 - protein, 9 aa, Artificial Sequence
  Peptide Derived from Human Papillomavirus
FGLPDTNIY

SEQ ID NO: 50411 - protein, 9 aa, Artificial Sequence
  Peptide Derived from Human Papillomavirus
VYVATPSGS

SEQ ID NO: 50412 - protein, 9 aa, Artificial Sequence
  Peptide Derived from Human Papillomavirus
VSKVVATDS

SEQ ID NO: 50413 - protein, 9 aa, Artificial Sequence
  Peptide Derived from Human Papillomavirus
LVWACVGLE

SEQ ID NO: 50414 - protein, 9 aa, Artificial Sequence
  Peptide Derived from Human Papillomavirus
LGRKFLMQL

SEQ ID NO: 50415 - protein, 9 aa, Artificial Sequence
  Peptide Derived from Human Papillomavirus
FQLCKITLS

SEQ ID NO: 50416 - protein, 9 aa, Artificial Sequence
  Peptide Derived from Human Papillomavirus
IVGCTPAMG

SEQ ID NO: 50417 - protein, 9 aa, Artificial Sequence
  Peptide Derived from Human Papillomavirus
VTVVDTTRS

SEQ ID NO: 50418 - protein, 9 aa, Artificial Sequence
  Peptide Derived from Human Papillomavirus
LCIVGCTPA

SEQ ID NO: 50419 - protein, 9 aa, Artificial Sequence
  Peptide Derived from Human Papillomavirus
VFRVRLPDP

SEQ ID NO: 50420 - protein, 9 aa, Artificial Sequence
  Peptide Derived from Human Papillomavirus
LMQLGTRSK

SEQ ID NO: 50421 - protein, 9 aa, Artificial Sequence
  Peptide Derived from Human Papillomavirus
WACVGLEVG

SEQ ID NO: 50422 - protein, 9 aa, Artificial Sequence
  Peptide Derived from Human Papillomavirus
MITSEAQLF

SEQ ID NO: 50423 - protein, 9 aa, Artificial Sequence
  Peptide Derived from Human Papillomavirus
YHAGSSRLL

SEQ ID NO: 50424 - protein, 9 aa, Artificial Sequence
  Peptide Derived from Human Papillomavirus
LAVGHPYYS

SEQ ID NO: 50425 - protein, 9 aa, Artificial Sequence
  Peptide Derived from Human Papillomavirus
LANNNVIED

SEQ ID NO: 50426 - protein, 9 aa, Artificial Sequence
  Peptide Derived from Human Papillomavirus
YVATPSGSM

SEQ ID NO: 50427 - protein, 9 aa, Artificial Sequence
  Peptide Derived from Human Papillomavirus
LDQFPLGRK

SEQ ID NO: 50428 - protein, 9 aa, Artificial Sequence
  Peptide Derived from Human Papillomavirus
MTISTATEQ

SEQ ID NO: 50429 - protein, 9 aa, Artificial Sequence
  Peptide Derived from Human Papillomavirus
VTTGDCPPL

SEQ ID NO: 50430 - protein, 9 aa, Artificial Sequence
  Peptide Derived from Human Papillomavirus
YVKRTSIFY

SEQ ID NO: 50431 - protein, 9 aa, Artificial Sequence
  Peptide Derived from Human Papillomavirus
LSKYDARKI

SEQ ID NO: 50432 - protein, 9 aa, Artificial Sequence
  Peptide Derived from Human Papillomavirus
MGEHWTKGA

SEQ ID NO: 50433 - protein, 9 aa, Artificial Sequence
  Peptide Derived from Human Papillomavirus
FYHAGSSRL

SEQ ID NO: 50434 - protein, 9 aa, Artificial Sequence
  Peptide Derived from Human Papillomavirus
YELQFVFQL

SEQ ID NO: 50435 - protein, 9 aa, Artificial Sequence
  Peptide Derived from Human Papillomavirus
IFLQMATWR

SEQ ID NO: 50436 - protein, 9 aa, Artificial Sequence
  Peptide Derived from Human Papillomavirus
LCKITLSAE

SEQ ID NO: 50437 - protein, 9 aa, Artificial Sequence
  Peptide Derived from Human Papillomavirus
VRLPDPNKF

SEQ ID NO: 50438 - protein, 9 aa, Artificial Sequence
  Peptide Derived from Human Papillomavirus
VNVFPIFLQ

SEQ ID NO: 50439 - protein, 9 aa, Artificial Sequence
  Peptide Derived from Human Papillomavirus
VVATDSYVK

SEQ ID NO: 50440 - protein, 9 aa, Artificial Sequence
  Peptide Derived from Human Papillomavirus
VDTTRSTNM

SEQ ID NO: 50441 - protein, 9 aa, Artificial Sequence
  Peptide Derived from Human Papillomavirus
LRREQLFAR

SEQ ID NO: 50442 - protein, 9 aa, Artificial Sequence
  Peptide Derived from Human Papillomavirus
YLKMSADAY

SEQ ID NO: 50443 - protein, 9 aa, Artificial Sequence
  Peptide Derived from Human Papillomavirus
FRVRLPDPN

SEQ ID NO: 50444 - protein, 9 aa, Artificial Sequence
  Peptide Derived from Human Papillomavirus
VRSTAITCQ

SEQ ID NO: 50445 - protein, 9 aa, Artificial Sequence
  Peptide Derived from Human Papillomavirus
VTKDNTKTN

SEQ ID NO: 50446 - protein, 9 aa, Artificial Sequence
  Peptide Derived from Human Papillomavirus
MVAHRATRR

SEQ ID NO: 50447 - protein, 9 aa, Artificial Sequence
  Peptide Derived from Human Papillomavirus
VAHRATRRK

SEQ ID NO: 50448 - protein, 9 aa, Artificial Sequence
  Peptide Derived from Human Papillomavirus
ILQWGSLFT

SEQ ID NO: 50449 - protein, 9 aa, Artificial Sequence
  Peptide Derived from Human Papillomavirus
IEMQPLLSA

SEQ ID NO: 50450 - protein, 9 aa, Artificial Sequence
  Peptide Derived from Human Papillomavirus
LSSQSVATP

SEQ ID NO: 50451 - protein, 9 aa, Artificial Sequence
  Peptide Derived from Human Papillomavirus
VSADNPLFE

SEQ ID NO: 50452 - protein, 9 aa, Artificial Sequence
  Peptide Derived from Human Papillomavirus
LPTGPSTWP

SEQ ID NO: 50453 - protein, 9 aa, Artificial Sequence
  Peptide Derived from Human Papillomavirus
LQWGSLFTY

SEQ ID NO: 50454 - protein, 9 aa, Artificial Sequence
  Peptide Derived from Human Papillomavirus
FLDRPATLV

SEQ ID NO: 50455 - protein, 9 aa, Artificial Sequence
  Peptide Derived from Human Papillomavirus
FMNIVALHR

SEQ ID NO: 50456 - protein, 9 aa, Artificial Sequence
  Peptide Derived from Human Papillomavirus
LAFSPSGVA

SEQ ID NO: 50457 - protein, 9 aa, Artificial Sequence
  Peptide Derived from Human Papillomavirus
MQPLLSANN

SEQ ID NO: 50458 - protein, 9 aa, Artificial Sequence
  Peptide Derived from Human Papillomavirus
MQTFAVHGS

SEQ ID NO: 50459 - protein, 9 aa, Artificial Sequence
  Peptide Derived from Human Papillomavirus
VIESGAGIP

SEQ ID NO: 50460 - protein, 9 aa, Artificial Sequence
  Peptide Derived from Human Papillomavirus
LYDIYANID

SEQ ID NO: 50461 - protein, 9 aa, Artificial Sequence
  Peptide Derived from Human Papillomavirus
VKVTDPAFL

SEQ ID NO: 50462 - protein, 9 aa, Artificial Sequence
  Peptide Derived from Human Papillomavirus
IAAPRLYRK

SEQ ID NO: 50463 - protein, 9 aa, Artificial Sequence
  Peptide Derived from Human Papillomavirus
LGRKATIQT

SEQ ID NO: 50464 - protein, 9 aa, Artificial Sequence
  Peptide Derived from Human Papillomavirus
FGGLGIGTG

SEQ ID NO: 50465 - protein, 9 aa, Artificial Sequence
  Peptide Derived from Human Papillomavirus
ITSSSTTTP

SEQ ID NO: 50466 - protein, 9 aa, Artificial Sequence
  Peptide Derived from Human Papillomavirus
LISTPTSGI

SEQ ID NO: 50467 - protein, 9 aa, Artificial Sequence
  Peptide Derived from Human Papillomavirus
FALWPVYFF

SEQ ID NO: 50468 - protein, 9 aa, Artificial Sequence
  Peptide Derived from Human Papillomavirus
YIQGSSFAL

SEQ ID NO: 50469 - protein, 9 aa, Artificial Sequence
  Peptide Derived from Human Papillomavirus
IKPSTLSFA

SEQ ID NO: 50470 - protein, 9 aa, Artificial Sequence
  Peptide Derived from Human Papillomavirus
YDISPIAQA

SEQ ID NO: 50471 - protein, 9 aa, Artificial Sequence
  Peptide Derived from Human Papillomavirus
YEEIPMQTF

SEQ ID NO: 50472 - protein, 9 aa, Artificial Sequence
  Peptide Derived from Human Papillomavirus
WGSLFTYFG

SEQ ID NO: 50473 - protein, 9 aa, Artificial Sequence
  Peptide Derived from Human Papillomavirus
FRRIAAPRL

SEQ ID NO: 50474 - protein, 9 aa, Artificial Sequence
  Peptide Derived from Human Papillomavirus
VTPARPPIV

SEQ ID NO: 50475 - protein, 9 aa, Artificial Sequence
  Peptide Derived from Human Papillomavirus
LVEESSVIE

SEQ ID NO: 50476 - protein, 9 aa, Artificial Sequence
  Peptide Derived from Human Papillomavirus
VALHRPAFT

SEQ ID NO: 50477 - protein, 9 aa, Artificial Sequence
  Peptide Derived from Human Papillomavirus
FAVHGSGTE

SEQ ID NO: 50478 - protein, 9 aa, Artificial Sequence
  Peptide Derived from Human Papillomavirus
ISTPTSGIH

SEQ ID NO: 50479 - protein, 9 aa, Artificial Sequence
  Peptide Derived from Human Papillomavirus
FEGTDTSLA

SEQ ID NO: 50480 - protein, 9 aa, Artificial Sequence
  Peptide Derived from Human Papillomavirus
FIDPPVIEA

SEQ ID NO: 50481 - protein, 9 aa, Artificial Sequence
  Peptide Derived from Human Papillomavirus
LDRPATLVS

SEQ ID NO: 50482 - protein, 9 aa, Artificial Sequence
  Peptide Derived from Human Papillomavirus
LDITPTSST

SEQ ID NO: 50483 - protein, 9 aa, Artificial Sequence
  Peptide Derived from Human Papillomavirus
MNIVALHRP

SEQ ID NO: 50484 - protein, 9 aa, Artificial Sequence
  Peptide Derived from Human Papillomavirus
VLPTGPSTW

SEQ ID NO: 50485 - protein, 9 aa, Artificial Sequence
  Peptide Derived from Human Papillomavirus
VESVGPTDP

SEQ ID NO: 50486 - protein, 9 aa, Artificial Sequence
  Peptide Derived from Human Papillomavirus
IDPPVIEAP

SEQ ID NO: 50487 - protein, 9 aa, Artificial Sequence
  Peptide Derived from Human Papillomavirus
IEAPQTGEV

SEQ ID NO: 50488 - protein, 9 aa, Artificial Sequence
  Peptide Derived from Human Papillomavirus
IVDVTPARP

SEQ ID NO: 50489 - protein, 9 aa, Artificial Sequence
  Peptide Derived from Human Papillomavirus
WADKILQWG

SEQ ID NO: 50490 - protein, 9 aa, Artificial Sequence
  Peptide Derived from Human Papillomavirus
LSANNSFDG

SEQ ID NO: 50491 - protein, 9 aa, Artificial Sequence
  Peptide Derived from Human Papillomavirus
YVPLGSRPS

SEQ ID NO: 50492 - protein, 9 aa, Artificial Sequence
  Peptide Derived from Human Papillomavirus
VRFSRLGRK

SEQ ID NO: 50493 - protein, 9 aa, Artificial Sequence
  Peptide Derived from Human Papillomavirus
FQQVKVTDP

SEQ ID NO: 50494 - protein, 9 aa, Artificial Sequence
  Peptide Derived from Human Papillomavirus
IPYFFADGD

SEQ ID NO: 50495 - protein, 9 aa, Artificial Sequence
  Peptide Derived from Human Papillomavirus
IVVESVGPT

SEQ ID NO: 50496 - protein, 9 aa, Artificial Sequence
  Peptide Derived from Human Papillomavirus
YYYDISPIA

SEQ ID NO: 50497 - protein, 9 aa, Artificial Sequence
  Peptide Derived from Human Papillomavirus
LPIKPSTLS

SEQ ID NO: 50498 - protein, 9 aa, Artificial Sequence
  Peptide Derived from Human Papillomavirus
FEITSSSTT

SEQ ID NO: 50499 - protein, 9 aa, Artificial Sequence
  Peptide Derived from Human Papillomavirus
ILISTPTSG

SEQ ID NO: 50500 - protein, 9 aa, Artificial Sequence
  Peptide Derived from Human Papillomavirus
FSPSGVAPD

SEQ ID NO: 50501 - protein, 9 aa, Artificial Sequence
  Peptide Derived from Human Papillomavirus
VATPSAHLP

SEQ ID NO: 50502 - protein, 9 aa, Artificial Sequence
  Peptide Derived from Human Papillomavirus
VHVSSTHIT

SEQ ID NO: 50503 - protein, 9 aa, Artificial Sequence
  Peptide Derived from Human Papillomavirus
VDVTPARPP

SEQ ID NO: 50504 - protein, 9 aa, Artificial Sequence
  Peptide Derived from Human Papillomavirus
LSGTCPEDV

SEQ ID NO: 50505 - protein, 9 aa, Artificial Sequence
  Peptide Derived from Human Papillomavirus
ISSTPIPGF

SEQ ID NO: 50506 - protein, 9 aa, Artificial Sequence
  Peptide Derived from Human Papillomavirus
VHGSGTEPI

SEQ ID NO: 50507 - protein, 9 aa, Artificial Sequence
  Peptide Derived from Human Papillomavirus
VSGNILIST

SEQ ID NO: 50508 - protein, 9 aa, Artificial Sequence
  Peptide Derived from Human Papillomavirus
VYIQGSSFA

SEQ ID NO: 50509 - protein, 9 aa, Artificial Sequence
  Peptide Derived from Human Papillomavirus
FASNTTNVT

SEQ ID NO: 50510 - protein, 9 aa, Artificial Sequence
  Peptide Derived from Human Papillomavirus
LFIDPPVIE

SEQ ID NO: 50511 - protein, 9 aa, Artificial Sequence
  Peptide Derived from Human Papillomavirus
VLDITPTSS

SEQ ID NO: 50512 - protein, 9 aa, Artificial Sequence
  Peptide Derived from Human Papillomavirus
YSGPDIVLP

SEQ ID NO: 50513 - protein, 9 aa, Artificial Sequence
  Peptide Derived from Human Papillomavirus
YKTCKLSGT

SEQ ID NO: 50514 - protein, 9 aa, Artificial Sequence
  Peptide Derived from Human Papillomavirus
VSSTHITNP

SEQ ID NO: 50515 - protein, 9 aa, Artificial Sequence
  Peptide Derived from Human Papillomavirus
FVPQSPYDV

SEQ ID NO: 50516 - protein, 9 aa, Artificial Sequence
  Peptide Derived from Human Papillomavirus
VGPTDPSIV

SEQ ID NO: 50517 - protein, 9 aa, Artificial Sequence
  Peptide Derived from Human Papillomavirus
YYDISPIAQ

SEQ ID NO: 50518 - protein, 9 aa, Artificial Sequence
  Peptide Derived from Human Papillomavirus
ITPTSSTVH

SEQ ID NO: 50519 - protein, 9 aa, Artificial Sequence
  Peptide Derived from Human Papillomavirus
VEESSVIES

SEQ ID NO: 50520 - protein, 9 aa, Artificial Sequence
  Peptide Derived from Human Papillomavirus
IDDEAPGLS

SEQ ID NO: 50521 - protein, 9 aa, Artificial Sequence
  Peptide Derived from Human Papillomavirus
LGSRPSTIV

SEQ ID NO: 50522 - protein, 15 aa, Artificial Sequence
  Peptide Derived from Human Papillomavirus
CWNYIDDNLRNALDG

SEQ ID NO: 50523 - protein, 15 aa, Artificial Sequence
  Peptide Derived from Human Papillomavirus
DNDIVDDSEIAYKYA

SEQ ID NO: 50524 - protein, 15 aa, Artificial Sequence
  Peptide Derived from Human Papillomavirus
GDAISDDENENDSDT

SEQ ID NO: 50525 - protein, 15 aa, Artificial Sequence
  Peptide Derived from Human Papillomavirus
ISEVYGDTPEWIQRQ

SEQ ID NO: 50526 - protein, 15 aa, Artificial Sequence
  Peptide Derived from Human Papillomavirus
KIGMLDDATVPCWNY

SEQ ID NO: 50527 - protein, 15 aa, Artificial Sequence
  Peptide Derived from Human Papillomavirus
LKAICIEKQSRAAKR

SEQ ID NO: 50528 - protein, 15 aa, Artificial Sequence
  Peptide Derived from Human Papillomavirus
NGWFYVEAVVEKKTG

SEQ ID NO: 50529 - protein, 15 aa, Artificial Sequence
  Peptide Derived from Human Papillomavirus
PMCMMIEPPKLRSTA

SEQ ID NO: 50530 - protein, 15 aa, Artificial Sequence
  Peptide Derived from Human Papillomavirus
PNEFPFDENGNPVYE

SEQ ID NO: 50531 - protein, 15 aa, Artificial Sequence
  Peptide Derived from Human Papillomavirus
QAKIVKDCATMCRHY

SEQ ID NO: 50532 - protein, 15 aa, Artificial Sequence
  Peptide Derived from Human Papillomavirus
QWAYDNDIVDDSEIA

SEQ ID NO: 50533 - protein, 15 aa, Artificial Sequence
  Peptide Derived from Human Papillomavirus
RLSLHEDEDKENDGD

SEQ ID NO: 50534 - protein, 15 aa, Artificial Sequence
  Peptide Derived from Human Papillomavirus
RRLFESEDSGYGNTE

SEQ ID NO: 50535 - protein, 15 aa, Artificial Sequence
  Peptide Derived from Human Papillomavirus
VDFIVNDNDYLTQAE

SEQ ID NO: 50536 - protein, 15 aa, Artificial Sequence
  Peptide Derived from Human Papillomavirus
VFTFPNEFPFDENGN

SEQ ID NO: 50537 - protein, 15 aa, Artificial Sequence
  Peptide Derived from Human Papillomavirus
WIKYRCDRVDDGGDW

SEQ ID NO: 50538 - protein, 15 aa, Artificial Sequence
  Peptide Derived from Human Papillomavirus
AVALGTEETQTTIQR

SEQ ID NO: 50539 - protein, 15 aa, Artificial Sequence
  Peptide Derived from Human Papillomavirus
ELQLTLETIYNSQYS

SEQ ID NO: 50540 - protein, 15 aa, Artificial Sequence
  Peptide Derived from Human Papillomavirus
EVQFDGDICNTMHYT

SEQ ID NO: 50541 - protein, 15 aa, Artificial Sequence
  Peptide Derived from Human Papillomavirus
FVQFKDDAEKYSKNK

SEQ ID NO: 50542 - protein, 15 aa, Artificial Sequence
  Peptide Derived from Human Papillomavirus
GLYYVHEGIRTYFVQ

SEQ ID NO: 50543 - protein, 15 aa, Artificial Sequence
  Peptide Derived from Human Papillomavirus
HIYICEEASVTVVEG

SEQ ID NO: 50544 - protein, 15 aa, Artificial Sequence
  Peptide Derived from Human Papillomavirus
IVHLKGDANTLKCLR

SEQ ID NO: 50545 - protein, 15 aa, Artificial Sequence
  Peptide Derived from Human Papillomavirus
IVTLTYDSEWQRDQF

SEQ ID NO: 50546 - protein, 15 aa, Artificial Sequence
  Peptide Derived from Human Papillomavirus
KHGYTVEVQFDGDIC

SEQ ID NO: 50547 - protein, 15 aa, Artificial Sequence
  Peptide Derived from Human Papillomavirus
LQDVSLEVYLTAPTG

SEQ ID NO: 50548 - protein, 15 aa, Artificial Sequence
  Peptide Derived from Human Papillomavirus
LTHYENDSTDLRDHI

SEQ ID NO: 50549 - protein, 15 aa, Artificial Sequence
  Peptide Derived from Human Papillomavirus
NSQYSNEKWTLQDVS

SEQ ID NO: 50550 - protein, 15 aa, Artificial Sequence
  Peptide Derived from Human Papillomavirus
RLNVCQDKILTHYEN

SEQ ID NO: 50551 - protein, 15 aa, Artificial Sequence
  Peptide Derived from Human Papillomavirus
THIYICEEASVTVVE

SEQ ID NO: 50552 - protein, 15 aa, Artificial Sequence
  Peptide Derived from Human Papillomavirus
TKLLHRDSVDSAPIL

SEQ ID NO: 50553 - protein, 15 aa, Artificial Sequence
  Peptide Derived from Human Papillomavirus
TLTYDSEWQRDQFLS

SEQ ID NO: 50554 - protein, 15 aa, Artificial Sequence
  Peptide Derived from Human Papillomavirus
TVEVQFDGDICNTMH

SEQ ID NO: 50555 - protein, 15 aa, Artificial Sequence
  Peptide Derived from Human Papillomavirus
WKHMRLECAIYYKAR

SEQ ID NO: 50556 - protein, 15 aa, Artificial Sequence
  Peptide Derived from Human Papillomavirus
IHDIILECVYCKQQL

SEQ ID NO: 50557 - protein, 15 aa, Artificial Sequence
  Peptide Derived from Human Papillomavirus
LCIVYRDGNPYAVCD

SEQ ID NO: 50558 - protein, 15 aa, Artificial Sequence
  Peptide Derived from Human Papillomavirus
LPQLCTELQTTIHDI

SEQ ID NO: 50559 - protein, 15 aa, Artificial Sequence
  Peptide Derived from Human Papillomavirus
QQLLRREVYDFAFRD

SEQ ID NO: 50560 - protein, 15 aa, Artificial Sequence
  Peptide Derived from Human Papillomavirus
RTAMFQDPQERPRKL

SEQ ID NO: 50561 - protein, 12 aa, Artificial Sequence
  Peptide Derived from Human Papillomavirus
MHGDTPTLHEYM

SEQ ID NO: 50562 - protein, 15 aa, Artificial Sequence
  Peptide Derived from Human Papillomavirus
LHEYMLDLQPETTDL

SEQ ID NO: 50563 - protein, 15 aa, Artificial Sequence
  Peptide Derived from Human Papillomavirus
MLDLQPETTDLYCYE

SEQ ID NO: 50564 - protein, 15 aa, Artificial Sequence
  Peptide Derived from Human Papillomavirus
TDLYCYEQLNDSSEE

SEQ ID NO: 50565 - protein, 15 aa, Artificial Sequence
  Peptide Derived from Human Papillomavirus
FFYLRREQMFVRHLF

SEQ ID NO: 50566 - protein, 15 aa, Artificial Sequence
  Peptide Derived from Human Papillomavirus
GENVPDDLYIKGSGS

SEQ ID NO: 50567 - protein, 15 aa, Artificial Sequence
  Peptide Derived from Human Papillomavirus
GSMVTSDAQIFNKPY

SEQ ID NO: 50568 - protein, 15 aa, Artificial Sequence
  Peptide Derived from Human Papillomavirus
INTVIQDGDMVDTGF

SEQ ID NO: 50569 - protein, 15 aa, Artificial Sequence
  Peptide Derived from Human Papillomavirus
ITCYENDVNVYHIFF

SEQ ID NO: 50570 - protein, 15 aa, Artificial Sequence
  Peptide Derived from Human Papillomavirus
KEKFSADLDQFPLGR

SEQ ID NO: 50571 - protein, 15 aa, Artificial Sequence
  Peptide Derived from Human Papillomavirus
KITLTADVMTYIHSM

SEQ ID NO: 50572 - protein, 15 aa, Artificial Sequence
  Peptide Derived from Human Papillomavirus
KSEVPLDICTSICKY

SEQ ID NO: 50573 - protein, 15 aa, Artificial Sequence
  Peptide Derived from Human Papillomavirus
NSTILEDWNFGLQPP

SEQ ID NO: 50574 - protein, 15 aa, Artificial Sequence
  Peptide Derived from Human Papillomavirus
SKVVSTDEYVARTNI

SEQ ID NO: 50575 - protein, 15 aa, Artificial Sequence
  Peptide Derived from Human Papillomavirus
SLWLPSEATVYLPPV

SEQ ID NO: 50576 - protein, 15 aa, Artificial Sequence
  Peptide Derived from Human Papillomavirus
TSFYNPDTQRLVWAC

SEQ ID NO: 50577 - protein, 15 aa, Artificial Sequence
  Peptide Derived from Human Papillomavirus
WACVGVEVGRGQPLG

SEQ ID NO: 50578 - protein, 15 aa, Artificial Sequence
  Peptide Derived from Human Papillomavirus
YIKMVSEPYGDSLFF

SEQ ID NO: 50579 - protein, 15 aa, Artificial Sequence
  Peptide Derived from Human Papillomavirus
ADDFITDTSTTPVPS

SEQ ID NO: 50580 - protein, 15 aa, Artificial Sequence
  Peptide Derived from Human Papillomavirus
IVSLVEETSFIDAGA

SEQ ID NO: 50581 - protein, 15 aa, Artificial Sequence
  Peptide Derived from Human Papillomavirus
KVHYYYDFSTIDSAE

SEQ ID NO: 50582 - protein, 12 aa, Artificial Sequence
  Peptide Derived from Human Papillomavirus
LPYFFSDVSLAA

SEQ ID NO: 50583 - protein, 15 aa, Artificial Sequence
  Peptide Derived from Human Papillomavirus
LYDIYADDFITDTST

SEQ ID NO: 50584 - protein, 15 aa, Artificial Sequence
  Peptide Derived from Human Papillomavirus
QYTIIADAGDFYLHP

SEQ ID NO: 50585 - protein, 15 aa, Artificial Sequence
  Peptide Derived from Human Papillomavirus
RPPLTVDPVGPSDPS

SEQ ID NO: 50586 - protein, 15 aa, Artificial Sequence
  Peptide Derived from Human Papillomavirus
SINIAPDPDFLDIVA

SEQ ID NO: 50587 - protein, 15 aa, Artificial Sequence
  Peptide Derived from Human Papillomavirus
TKLITYDNPAYEGID

SEQ ID NO: 50588 - protein, 15 aa, Artificial Sequence
  Peptide Derived from Human Papillomavirus
VPSIPPDVSGFSITT

SEQ ID NO: 50589 - protein, 15 aa, Artificial Sequence
  Peptide Derived from Human Papillomavirus
YDIYADDFITDTSTT

SEQ ID NO: 50590 - protein, 15 aa, Artificial Sequence
  Peptide Derived from Human Papillomavirus
YEEIPMDTFIVSTNP

SEQ ID NO: 50591 - protein, 15 aa, Artificial Sequence
  Peptide Derived from Human Papillomavirus
YEGIDVDNTLYFSSN

SEQ ID NO: 50592 - protein, 15 aa, Artificial Sequence
  Peptide Derived from Human Papillomavirus
AQEVHNDAQVLHVLK

SEQ ID NO: 50593 - protein, 15 aa, Artificial Sequence
  Peptide Derived from Human Papillomavirus
DNELTDESDMAFEYA

SEQ ID NO: 50594 - protein, 15 aa, Artificial Sequence
  Peptide Derived from Human Papillomavirus
ESDMAFEYALLADSN

SEQ ID NO: 50595 - protein, 15 aa, Artificial Sequence
  Peptide Derived from Human Papillomavirus
EYALLADSNSNAAAF

SEQ ID NO: 50596 - protein, 15 aa, Artificial Sequence
  Peptide Derived from Human Papillomavirus
GDVISDDEDENATDT

SEQ ID NO: 50597 - protein, 15 aa, Artificial Sequence
  Peptide Derived from Human Papillomavirus
GERLEVDTELSPRLQ

SEQ ID NO: 50598 - protein, 15 aa, Artificial Sequence
  Peptide Derived from Human Papillomavirus
ISEVMGDTPEWIQRL

SEQ ID NO: 50599 - protein, 15 aa, Artificial Sequence
  Peptide Derived from Human Papillomavirus
KVAMLDDATTTCWTY

SEQ ID NO: 50600 - protein, 15 aa, Artificial Sequence
  Peptide Derived from Human Papillomavirus
MLAVFKDTYGLSFTD

SEQ ID NO: 50601 - protein, 15 aa, Artificial Sequence
  Peptide Derived from Human Papillomavirus
PNAFPFDKNGNPVYE

SEQ ID NO: 50602 - protein, 15 aa, Artificial Sequence
  Peptide Derived from Human Papillomavirus
QAKYLKDCATMCKHY

SEQ ID NO: 50603 - protein, 15 aa, Artificial Sequence
  Peptide Derived from Human Papillomavirus
QWAFDNELTDESDMA

SEQ ID NO: 50604 - protein, 15 aa, Artificial Sequence
  Peptide Derived from Human Papillomavirus
RLDLHEEEEDADTEG

SEQ ID NO: 50605 - protein, 15 aa, Artificial Sequence
  Peptide Derived from Human Papillomavirus
RLEVDTELSPRLQEI

SEQ ID NO: 50606 - protein, 15 aa, Artificial Sequence
  Peptide Derived from Human Papillomavirus
TGDVISDDEDENATD

SEQ ID NO: 50607 - protein, 15 aa, Artificial Sequence
  Peptide Derived from Human Papillomavirus
TSHFWLEPLTDTKVA

SEQ ID NO: 50608 - protein, 15 aa, Artificial Sequence
  Peptide Derived from Human Papillomavirus
VRNFKSDKTTCTDWV

SEQ ID NO: 50609 - protein, 15 aa, Artificial Sequence
  Peptide Derived from Human Papillomavirus
GLYYVKEGYNTFYIE

SEQ ID NO: 50610 - protein, 15 aa, Artificial Sequence
  Peptide Derived from Human Papillomavirus
IIHLKGDRNSLKCLR

SEQ ID NO: 50611 - protein, 15 aa, Artificial Sequence
  Peptide Derived from Human Papillomavirus
MTYVAWDSVYYMTDA

SEQ ID NO: 50612 - protein, 15 aa, Artificial Sequence
  Peptide Derived from Human Papillomavirus
QSRYKTEDWTLQDTC

SEQ ID NO: 50613 - protein, 15 aa, Artificial Sequence
  Peptide Derived from Human Papillomavirus
SVYYMTDAGTWDKTA

SEQ ID NO: 50614 - protein, 15 aa, Artificial Sequence
  Peptide Derived from Human Papillomavirus
TVQVYFDGNKDNCMT

SEQ ID NO: 50615 - protein, 15 aa, Artificial Sequence
  Peptide Derived from Human Papillomavirus
TVTYHSETQRTKFLN

SEQ ID NO: 50616 - protein, 15 aa, Artificial Sequence
  Peptide Derived from Human Papillomavirus
WQLIRWENAIFFAAR

SEQ ID NO: 50617 - protein, 15 aa, Artificial Sequence
  Peptide Derived from Human Papillomavirus
YIEFKSECEKYGNTG

SEQ ID NO: 50618 - protein, 15 aa, Artificial Sequence
  Peptide Derived from Human Papillomavirus
LFVVYRDSIPHAACH

SEQ ID NO: 50619 - protein, 15 aa, Artificial Sequence
  Peptide Derived from Human Papillomavirus
LPDLCTELNTSLQDI

SEQ ID NO: 50620 - protein, 15 aa, Artificial Sequence
  Peptide Derived from Human Papillomavirus
SDSVYGDTLEKLTNT

SEQ ID NO: 50621 - protein, 15 aa, Artificial Sequence
  Peptide Derived from Human Papillomavirus
DIVLHLEPQNEIPVD

SEQ ID NO: 50622 - protein, 15 aa, Artificial Sequence
  Peptide Derived from Human Papillomavirus
QNEIPVDLLCHEQLS

SEQ ID NO: 50623 - protein, 15 aa, Artificial Sequence
  Peptide Derived from Human Papillomavirus
RIKLVVESSADDLRA

SEQ ID NO: 50624 - protein, 15 aa, Artificial Sequence
  Peptide Derived from Human Papillomavirus
VDLLCHEQLSDSEEE

SEQ ID NO: 50625 - protein, 15 aa, Artificial Sequence
  Peptide Derived from Human Papillomavirus
ARVVNTDDYVTPTSI

SEQ ID NO: 50626 - protein, 15 aa, Artificial Sequence
  Peptide Derived from Human Papillomavirus
FFCLRREQLFARHFW

SEQ ID NO: 50627 - protein, 15 aa, Artificial Sequence
  Peptide Derived from Human Papillomavirus
GSIVTSDSQLFNKPY

SEQ ID NO: 50628 - protein, 15 aa, Artificial Sequence
  Peptide Derived from Human Papillomavirus
KCEVPLDICQSICKY

SEQ ID NO: 50629 - protein, 15 aa, Artificial Sequence
  Peptide Derived from Human Papillomavirus
KEKFSLDLDQYPLGR

SEQ ID NO: 50630 - protein, 15 aa, Artificial Sequence
  Peptide Derived from Human Papillomavirus
KFSLDLDQYPLGRKF

SEQ ID NO: 50631 - protein, 15 aa, Artificial Sequence
  Peptide Derived from Human Papillomavirus
KNTVLEDGDMVDTGY

SEQ ID NO: 50632 - protein, 15 aa, Artificial Sequence
  Peptide Derived from Human Papillomavirus
NSSILEDWNFGVPPP

SEQ ID NO: 50633 - protein, 15 aa, Artificial Sequence
  Peptide Derived from Human Papillomavirus
TITLTADVMSYIHSM

SEQ ID NO: 50634 - protein, 15 aa, Artificial Sequence
  Peptide Derived from Human Papillomavirus
TSIYNPETQRLVWAC

SEQ ID NO: 50635 - protein, 15 aa, Artificial Sequence
  Peptide Derived from Human Papillomavirus
YLQMSADPYGDSMFF

SEQ ID NO: 50636 - protein, 15 aa, Artificial Sequence
  Peptide Derived from Human Papillomavirus
FDIYADDMDPAVPVP

SEQ ID NO: 50637 - protein, 15 aa, Artificial Sequence
  Peptide Derived from Human Papillomavirus
IVTLIEDSSVVTSGA

SEQ ID NO: 50638 - protein, 15 aa, Artificial Sequence
  Peptide Derived from Human Papillomavirus
LFDIYADDMDPAVPV

SEQ ID NO: 50639 - protein, 15 aa, Artificial Sequence
  Peptide Derived from Human Papillomavirus
RPPVVIEPVGPTDPS

SEQ ID NO: 50640 - protein, 15 aa, Artificial Sequence
  Peptide Derived from Human Papillomavirus
RVHFYHDISPIAPSP

SEQ ID NO: 50641 - protein, 15 aa, Artificial Sequence
  Peptide Derived from Human Papillomavirus
SSLITYDNPAFEPVD

SEQ ID NO: 50642 - protein, 12 aa, Artificial Sequence
  Peptide Derived from Human Papillomavirus
VPYFFADGFVAA

SEQ ID NO: 50643 - protein, 15 aa, Artificial Sequence
  Peptide Derived from Human Papillomavirus
CDKVSDEGDWRDIVK

SEQ ID NO: 50644 - protein, 15 aa, Artificial Sequence
  Peptide Derived from Human Papillomavirus
DNDVMDDSEIAYKYA

SEQ ID NO: 50645 - protein, 15 aa, Artificial Sequence
  Peptide Derived from Human Papillomavirus
GDNISEDENEDSSDT

SEQ ID NO: 50646 - protein, 15 aa, Artificial Sequence
  Peptide Derived from Human Papillomavirus
ISDVYGETPEWIERQ

SEQ ID NO: 50647 - protein, 15 aa, Artificial Sequence
  Peptide Derived from Human Papillomavirus
KIGMLDDATTPCWHY

SEQ ID NO: 50648 - protein, 15 aa, Artificial Sequence
  Peptide Derived from Human Papillomavirus
KNRITIEKLLEKLLC

SEQ ID NO: 50649 - protein, 15 aa, Artificial Sequence
  Peptide Derived from Human Papillomavirus
LKAICIENNSKTAKR

SEQ ID NO: 50650 - protein, 15 aa, Artificial Sequence
  Peptide Derived from Human Papillomavirus
NGWFYVEAVIDRQTG

SEQ ID NO: 50651 - protein, 15 aa, Artificial Sequence
  Peptide Derived from Human Papillomavirus
PNPFPFDKNGNPVYE

SEQ ID NO: 50652 - protein, 15 aa, Artificial Sequence
  Peptide Derived from Human Papillomavirus
QAKIVKDCGTMCRHY

SEQ ID NO: 50653 - protein, 15 aa, Artificial Sequence
  Peptide Derived from Human Papillomavirus
QQMVQVEEQQTTLSC

SEQ ID NO: 50654 - protein, 15 aa, Artificial Sequence
  Peptide Derived from Human Papillomavirus
QWAYDNDVMDDSEIA

SEQ ID NO: 50655 - protein, 15 aa, Artificial Sequence
  Peptide Derived from Human Papillomavirus
RLNLHEEEDKENDGD

SEQ ID NO: 50656 - protein, 15 aa, Artificial Sequence
  Peptide Derived from Human Papillomavirus
ELQMMLETLNNTEYK

SEQ ID NO: 50657 - protein, 15 aa, Artificial Sequence
  Peptide Derived from Human Papillomavirus
ESVFSSDEISFAGIV

SEQ ID NO: 50658 - protein, 15 aa, Artificial Sequence
  Peptide Derived from Human Papillomavirus
FIYLCIDGQCTVVEG

SEQ ID NO: 50659 - protein, 15 aa, Artificial Sequence
  Peptide Derived from Human Papillomavirus
IIHLKGDANILKCLR

SEQ ID NO: 50660 - protein, 15 aa, Artificial Sequence
  Peptide Derived from Human Papillomavirus
KHGYTVEVQFDGDVH

SEQ ID NO: 50661 - protein, 15 aa, Artificial Sequence
  Peptide Derived from Human Papillomavirus
NKLLRGDSVDSVNCG

SEQ ID NO: 50662 - protein, 15 aa, Artificial Sequence
  Peptide Derived from Human Papillomavirus
NTEYKNEDWTMQQTS

SEQ ID NO: 50663 - protein, 15 aa, Artificial Sequence
  Peptide Derived from Human Papillomavirus
QVIVFPESVFSSDEI

SEQ ID NO: 50664 - protein, 15 aa, Artificial Sequence
  Peptide Derived from Human Papillomavirus
RLNVCQDKILEHYEN

SEQ ID NO: 50665 - protein, 15 aa, Artificial Sequence
  Peptide Derived from Human Papillomavirus
TVEVQFDGDVHNTMH

SEQ ID NO: 50666 - protein, 15 aa, Artificial Sequence
  Peptide Derived from Human Papillomavirus
WKHIRLECVLMYKAR

SEQ ID NO: 50667 - protein, 15 aa, Artificial Sequence
  Peptide Derived from Human Papillomavirus
ALEIPYDELRLNCVY

SEQ ID NO: 50668 - protein, 15 aa, Artificial Sequence
  Peptide Derived from Human Papillomavirus
LTIVYRDDTPHGVCT

SEQ ID NO: 50669 - protein, 15 aa, Artificial Sequence
  Peptide Derived from Human Papillomavirus
TIVYRDDTPHGVCTK

SEQ ID NO: 50670 - protein, 12 aa, Artificial Sequence
  Peptide Derived from Human Papillomavirus
MRGETPTLQDYV

SEQ ID NO: 50671 - protein, 15 aa, Artificial Sequence
  Peptide Derived from Human Papillomavirus
DIRILQELLMGSFGI

SEQ ID NO: 50672 - protein, 15 aa, Artificial Sequence
  Peptide Derived from Human Papillomavirus
LQDYVLDLQPEATDL

SEQ ID NO: 50673 - protein, 15 aa, Artificial Sequence
  Peptide Derived from Human Papillomavirus
VLDLQPEATDLHCYE

SEQ ID NO: 50674 - protein, 15 aa, Artificial Sequence
  Peptide Derived from Human Papillomavirus
FFYLRREQMFVRHFF

SEQ ID NO: 50675 - protein, 15 aa, Artificial Sequence
  Peptide Derived from Human Papillomavirus
GESVPTDLYIKGSGS

SEQ ID NO: 50676 - protein, 15 aa, Artificial Sequence
  Peptide Derived from Human Papillomavirus
GSMVTSDAQIFNKPY

SEQ ID NO: 50677 - protein, 15 aa, Artificial Sequence
  Peptide Derived from Human Papillomavirus
KDYVFWEVNLKEKFS

SEQ ID NO: 50678 - protein, 15 aa, Artificial Sequence
  Peptide Derived from Human Papillomavirus
KEKFSADLDQFPLGR

SEQ ID NO: 50679 - protein, 15 aa, Artificial Sequence
  Peptide Derived from Human Papillomavirus
KITLSADIMTYIHSM

SEQ ID NO: 50680 - protein, 15 aa, Artificial Sequence
  Peptide Derived from Human Papillomavirus
KNSVIQDGDMVDTGF

SEQ ID NO: 50681 - protein, 15 aa, Artificial Sequence
  Peptide Derived from Human Papillomavirus
KSNVPLDICNSICKY

SEQ ID NO: 50682 - protein, 15 aa, Artificial Sequence
  Peptide Derived from Human Papillomavirus
NPAILEDWNFGLTTP

SEQ ID NO: 50683 - protein, 15 aa, Artificial Sequence
  Peptide Derived from Human Papillomavirus
SKVVSTDEYVTRTNI

SEQ ID NO: 50684 - protein, 15 aa, Artificial Sequence
  Peptide Derived from Human Papillomavirus
TSFYNPETQRLVWAC

SEQ ID NO: 50685 - protein, 15 aa, Artificial Sequence
  Peptide Derived from Human Papillomavirus
WACVGLEVGRGQPLG

SEQ ID NO: 50686 - protein, 15 aa, Artificial Sequence
  Peptide Derived from Human Papillomavirus
YLKMVAEPYGDTLFF

SEQ ID NO: 50687 - protein, 15 aa, Artificial Sequence
  Peptide Derived from Human Papillomavirus
DTDFTVDTPATHNVS

SEQ ID NO: 50688 - protein, 15 aa, Artificial Sequence
  Peptide Derived from Human Papillomavirus
GPDVPIEHAPTQVFP

SEQ ID NO: 50689 - protein, 15 aa, Artificial Sequence
  Peptide Derived from Human Papillomavirus
IVSLVEESGIVDVGA

SEQ ID NO: 50690 - protein, 15 aa, Artificial Sequence
  Peptide Derived from Human Papillomavirus
KQLITYENPAYETVN

SEQ ID NO: 50691 - protein, 15 aa, Artificial Sequence
  Peptide Derived from Human Papillomavirus
LYDIYADTDFTVDTP

SEQ ID NO: 50692 - protein, 15 aa, Artificial Sequence
  Peptide Derived from Human Papillomavirus
QVSIFVDGGDFYLHP

SEQ ID NO: 50693 - protein, 15 aa, Artificial Sequence
  Peptide Derived from Human Papillomavirus
RPPVSIDPVGPLDPS

SEQ ID NO: 50694 - protein, 15 aa, Artificial Sequence
  Peptide Derived from Human Papillomavirus
RVHYYYDISSINPAG

SEQ ID NO: 50695 - protein, 15 aa, Artificial Sequence
  Peptide Derived from Human Papillomavirus
SHNIAPDPDFLDIIA

SEQ ID NO: 50696 - protein, 12 aa, Artificial Sequence
  Peptide Derived from Human Papillomavirus
VSYFFTDVSVAA

SEQ ID NO: 50697 - protein, 15 aa, Artificial Sequence
  Peptide Derived from Human Papillomavirus
YEEIPMDTFIVSTNN

SEQ ID NO: 50698 - protein, 15 aa, Artificial Sequence
  Peptide Derived from Human Papillomavirus
YETVNAEESLYFSNT

SEQ ID NO: 50699 - protein, 15 aa, Artificial Sequence
  Peptide Derived from Human Papillomavirus
DNELTDDSDIAYYYA

SEQ ID NO: 50700 - protein, 15 aa, Artificial Sequence
  Peptide Derived from Human Papillomavirus
DSEVSCETNVDSCEN

SEQ ID NO: 50701 - protein, 15 aa, Artificial Sequence
  Peptide Derived from Human Papillomavirus
ENSIQADTEAARALF

SEQ ID NO: 50702 - protein, 15 aa, Artificial Sequence
  Peptide Derived from Human Papillomavirus
ETCMVIEPPKLRSQT

SEQ ID NO: 50703 - protein, 15 aa, Artificial Sequence
  Peptide Derived from Human Papillomavirus
GDNISEDEDETADDS

SEQ ID NO: 50704 - protein, 15 aa, Artificial Sequence
  Peptide Derived from Human Papillomavirus
KIGMIDDVTPISWTY

SEQ ID NO: 50705 - protein, 15 aa, Artificial Sequence
  Peptide Derived from Human Papillomavirus
KLDLIEEEDKENHGG

SEQ ID NO: 50706 - protein, 15 aa, Artificial Sequence
  Peptide Derived from Human Papillomavirus
KNPFPFDENGNPVYA

SEQ ID NO: 50707 - protein, 15 aa, Artificial Sequence
  Peptide Derived from Human Papillomavirus
LLEFIDDSMENSIQA

SEQ ID NO: 50708 - protein, 15 aa, Artificial Sequence
  Peptide Derived from Human Papillomavirus
LQCLTCDRGIIILLL

SEQ ID NO: 50709 - protein, 15 aa, Artificial Sequence
  Peptide Derived from Human Papillomavirus
QAKIVKDCGIMCRHY

SEQ ID NO: 50710 - protein, 15 aa, Artificial Sequence
  Peptide Derived from Human Papillomavirus
QWAYDNELTDDSDIA

SEQ ID NO: 50711 - protein, 15 aa, Artificial Sequence
  Peptide Derived from Human Papillomavirus
SSGVGDDSEVSCETN

SEQ ID NO: 50712 - protein, 15 aa, Artificial Sequence
  Peptide Derived from Human Papillomavirus
SWTYIDDYMRNALDG

SEQ ID NO: 50713 - protein, 15 aa, Artificial Sequence
  Peptide Derived from Human Papillomavirus
TGWFEVEAVIERRTG

SEQ ID NO: 50714 - protein, 15 aa, Artificial Sequence
  Peptide Derived from Human Papillomavirus
VRPFKSDKTSCTDWC

SEQ ID NO: 50715 - protein, 15 aa, Artificial Sequence
  Peptide Derived from Human Papillomavirus
VYAINDENWKSFFSR

SEQ ID NO: 50716 - protein, 15 aa, Artificial Sequence
  Peptide Derived from Human Papillomavirus
EIYIIEEDTCTMVTG

SEQ ID NO: 50717 - protein, 15 aa, Artificial Sequence
  Peptide Derived from Human Papillomavirus
ELQMALETLSKSQYS

SEQ ID NO: 50718 - protein, 15 aa, Artificial Sequence
  Peptide Derived from Human Papillomavirus
FKYFKEDAAKYSKTQ

SEQ ID NO: 50719 - protein, 15 aa, Artificial Sequence
  Peptide Derived from Human Papillomavirus
GEIYIIEEDTCTMVT

SEQ ID NO: 50720 - protein, 15 aa, Artificial Sequence
  Peptide Derived from Human Papillomavirus
IVHLKGESNSLKCLR

SEQ ID NO: 50721 - protein, 15 aa, Artificial Sequence
  Peptide Derived from Human Papillomavirus
IYIIEEDTCTMVTGK

SEQ ID NO: 50722 - protein, 15 aa, Artificial Sequence
  Peptide Derived from Human Papillomavirus
LDLYEADKTDLPSQI

SEQ ID NO: 50723 - protein, 15 aa, Artificial Sequence
  Peptide Derived from Human Papillomavirus
TADIQTDNDNRPPQA

SEQ ID NO: 50724 - protein, 15 aa, Artificial Sequence
  Peptide Derived from Human Papillomavirus
TKLFCADPALDNRTA

SEQ ID NO: 50725 - protein, 15 aa, Artificial Sequence
  Peptide Derived from Human Papillomavirus
TVTFVTEQQQQMFLG

SEQ ID NO: 50726 - protein, 15 aa, Artificial Sequence
  Peptide Derived from Human Papillomavirus
TVTVQYDNDKKNTMD

SEQ ID NO: 50727 - protein, 15 aa, Artificial Sequence
  Peptide Derived from Human Papillomavirus
WKLIRMECALLYTAK

SEQ ID NO: 50728 - protein, 15 aa, Artificial Sequence
  Peptide Derived from Human Papillomavirus
YFKYFKEDAAKYSKT

SEQ ID NO: 50729 - protein, 12 aa, Artificial Sequence
  Peptide Derived from Human Papillomavirus
MFQDTEEKPRTL

SEQ ID NO: 50730 - protein, 15 aa, Artificial Sequence
  Peptide Derived from Human Papillomavirus
LTVVYREGNPFGICK

SEQ ID NO: 50731 - protein, 15 aa, Artificial Sequence
  Peptide Derived from Human Papillomavirus
LKEYVLDLYPEPTDL

SEQ ID NO: 50732 - protein, 15 aa, Artificial Sequence
  Peptide Derived from Human Papillomavirus
TDLYCYEQLSDSSDE

SEQ ID NO: 50733 - protein, 15 aa, Artificial Sequence
  Peptide Derived from Human Papillomavirus
VLDLYPEPTDLYCYE

SEQ ID NO: 50734 - protein, 15 aa, Artificial Sequence
  Peptide Derived from Human Papillomavirus
CTQVTSDSTYKNENF

SEQ ID NO: 50735 - protein, 15 aa, Artificial Sequence
  Peptide Derived from Human Papillomavirus
DSTYKNENFKEYIRH

SEQ ID NO: 50736 - protein, 15 aa, Artificial Sequence
  Peptide Derived from Human Papillomavirus
FFFLRREQMFVRHFF

SEQ ID NO: 50737 - protein, 15 aa, Artificial Sequence
  Peptide Derived from Human Papillomavirus
GEAVPDDLYIKGSGT

SEQ ID NO: 50738 - protein, 15 aa, Artificial Sequence
  Peptide Derived from Human Papillomavirus
GSMVTSESQLFNKPY

SEQ ID NO: 50739 - protein, 15 aa, Artificial Sequence
  Peptide Derived from Human Papillomavirus
IHAMNPDILEDWQFG

SEQ ID NO: 50740 - protein, 15 aa, Artificial Sequence
  Peptide Derived from Human Papillomavirus
INTIIEDGDMVDTGF

SEQ ID NO: 50741 - protein, 15 aa, Artificial Sequence
  Peptide Derived from Human Papillomavirus
KEKFSADLDQFPLGR

SEQ ID NO: 50742 - protein, 15 aa, Artificial Sequence
  Peptide Derived from Human Papillomavirus
KSDVPIDICGSTCKY

SEQ ID NO: 50743 - protein, 15 aa, Artificial Sequence
  Peptide Derived from Human Papillomavirus
KVTLTAEVMTYIHAM

SEQ ID NO: 50744 - protein, 15 aa, Artificial Sequence
  Peptide Derived from Human Papillomavirus
NPDILEDWQFGLTPP

SEQ ID NO: 50745 - protein, 15 aa, Artificial Sequence
  Peptide Derived from Human Papillomavirus
SKVVSTDEYVSRTSI

SEQ ID NO: 50746 - protein, 15 aa, Artificial Sequence
  Peptide Derived from Human Papillomavirus
TSFYNPDTQRLVWAC

SEQ ID NO: 50747 - protein, 15 aa, Artificial Sequence
  Peptide Derived from Human Papillomavirus
WACVGLEIGRGQPLG

SEQ ID NO: 50748 - protein, 15 aa, Artificial Sequence
  Peptide Derived from Human Papillomavirus
YLKMTSEPYGDSLFF

SEQ ID NO: 50749 - protein, 15 aa, Artificial Sequence
  Peptide Derived from Human Papillomavirus
DHTVPNEQYELQPLH

SEQ ID NO: 50750 - protein, 15 aa, Artificial Sequence
  Peptide Derived from Human Papillomavirus
FDTIVVDGADFVLHP

SEQ ID NO: 50751 - protein, 15 aa, Artificial Sequence
  Peptide Derived from Human Papillomavirus
FESFDPEDTLQFQHS

SEQ ID NO: 50752 - protein, 15 aa, Artificial Sequence
  Peptide Derived from Human Papillomavirus
HKLITYDNPAFESFD

SEQ ID NO: 50753 - protein, 15 aa, Artificial Sequence
  Peptide Derived from Human Papillomavirus
IVSLIEETSFIEAGA

SEQ ID NO: 50754 - protein, 15 aa, Artificial Sequence
  Peptide Derived from Human Papillomavirus
LYDVYADDVDNVHTP

SEQ ID NO: 50755 - protein, 15 aa, Artificial Sequence
  Peptide Derived from Human Papillomavirus
RIHYYQDLSPIVPLD

SEQ ID NO: 50756 - protein, 15 aa, Artificial Sequence
  Peptide Derived from Human Papillomavirus
RPPVTVDTVGPLDSS

SEQ ID NO: 50757 - protein, 15 aa, Artificial Sequence
  Peptide Derived from Human Papillomavirus
SPFFPFDTIVVDGAD

SEQ ID NO: 50758 - protein, 15 aa, Artificial Sequence
  Peptide Derived from Human Papillomavirus
SPIVPLDHTVPNEQY

SEQ ID NO: 50759 - protein, 15 aa, Artificial Sequence
  Peptide Derived from Human Papillomavirus
TFVVSTDSSNVTSST

SEQ ID NO: 50760 - protein, 15 aa, Artificial Sequence
  Peptide Derived from Human Papillomavirus
YDVYADDVDNVHTPM

SEQ ID NO: 50761 - protein, 15 aa, Artificial Sequence
  Peptide Derived from Human Papillomavirus
YENIPMDTFVVSTDS

SEQ ID NO: 50762 - protein, 15 aa, Artificial Sequence
  Peptide Derived from Human Papillomavirus
YVPIGTDPPTAAIPL

SEQ ID NO: 50763 - protein, 15 aa, Artificial Sequence
  Peptide Derived from Human Papillomavirus
AQEVQNDAQVLHLLK

SEQ ID NO: 50764 - protein, 15 aa, Artificial Sequence
  Peptide Derived from Human Papillomavirus
DNDLTDESDMAFQYA

SEQ ID NO: 50765 - protein, 15 aa, Artificial Sequence
  Peptide Derived from Human Papillomavirus
ETCMLIEPPKLRSSV

SEQ ID NO: 50766 - protein, 15 aa, Artificial Sequence
  Peptide Derived from Human Papillomavirus
GDVISDDEDETATDT

SEQ ID NO: 50767 - protein, 15 aa, Artificial Sequence
  Peptide Derived from Human Papillomavirus
GEQLSVDTDLSPRLQ

SEQ ID NO: 50768 - protein, 15 aa, Artificial Sequence
  Peptide Derived from Human Papillomavirus
ISEVSGDTPEWIQRL

SEQ ID NO: 50769 - protein, 15 aa, Artificial Sequence
  Peptide Derived from Human Papillomavirus
KVAMLDDATHTCWTY

SEQ ID NO: 50770 - protein, 15 aa, Artificial Sequence
  Peptide Derived from Human Papillomavirus
MLAVFKDIYGLSFTD

SEQ ID NO: 50771 - protein, 15 aa, Artificial Sequence
  Peptide Derived from Human Papillomavirus
NGWFFVETIVEKKTG

SEQ ID NO: 50772 - protein, 15 aa, Artificial Sequence
  Peptide Derived from Human Papillomavirus
NSHFWLEPLADTKVA

SEQ ID NO: 50773 - protein, 15 aa, Artificial Sequence
  Peptide Derived from Human Papillomavirus
PHAFPFDKNGNPVYE

SEQ ID NO: 50774 - protein, 15 aa, Artificial Sequence
  Peptide Derived from Human Papillomavirus
QAKYLKDCAVMCRHY

SEQ ID NO: 50775 - protein, 15 aa, Artificial Sequence
  Peptide Derived from Human Papillomavirus
QLSVDTDLSPRLQEI

SEQ ID NO: 50776 - protein, 15 aa, Artificial Sequence
  Peptide Derived from Human Papillomavirus
QWAFDNDLTDESDMA

SEQ ID NO: 50777 - protein, 15 aa, Artificial Sequence
  Peptide Derived from Human Papillomavirus
RLDLHEDDEDADTEG

SEQ ID NO: 50778 - protein, 15 aa, Artificial Sequence
  Peptide Derived from Human Papillomavirus
TGDVISDDEDETATD

SEQ ID NO: 50779 - protein, 15 aa, Artificial Sequence
  Peptide Derived from Human Papillomavirus
VRNFKSDKTTCTDWV

SEQ ID NO: 50780 - protein, 15 aa, Artificial Sequence
  Peptide Derived from Human Papillomavirus
GVYYIKDGDTTYYVQ

SEQ ID NO: 50781 - protein, 15 aa, Artificial Sequence
  Peptide Derived from Human Papillomavirus
IIHLKGDKNSLKCLR

SEQ ID NO: 50782 - protein, 15 aa, Artificial Sequence
  Peptide Derived from Human Papillomavirus
MNYVVWDSIYYITET

SEQ ID NO: 50783 - protein, 15 aa, Artificial Sequence
  Peptide Derived from Human Papillomavirus
QSKYNNEEWTLQDTC

SEQ ID NO: 50784 - protein, 15 aa, Artificial Sequence
  Peptide Derived from Human Papillomavirus
SIYYITETGIWDKTA

SEQ ID NO: 50785 - protein, 15 aa, Artificial Sequence
  Peptide Derived from Human Papillomavirus
TVHVYFDGNKDNCMN

SEQ ID NO: 50786 - protein, 15 aa, Artificial Sequence
  Peptide Derived from Human Papillomavirus
TVTYNSEVQRNTFLD

SEQ ID NO: 50787 - protein, 15 aa, Artificial Sequence
  Peptide Derived from Human Papillomavirus
WQLIRLENAILFTAR

SEQ ID NO: 50788 - protein, 15 aa, Artificial Sequence
  Peptide Derived from Human Papillomavirus
YVQFKSECEKYGNSN

SEQ ID NO: 50789 - protein, 15 aa, Artificial Sequence
  Peptide Derived from Human Papillomavirus
LFIVYRDCIAYAACH

SEQ ID NO: 50790 - protein, 15 aa, Artificial Sequence
  Peptide Derived from Human Papillomavirus
LPDLCTELNTSLQDV

SEQ ID NO: 50791 - protein, 15 aa, Artificial Sequence
  Peptide Derived from Human Papillomavirus
SNSVYGETLEKITNT

SEQ ID NO: 50792 - protein, 15 aa, Artificial Sequence
  Peptide Derived from Human Papillomavirus
EIVLHLEPQNELDPV

SEQ ID NO: 50793 - protein, 15 aa, Artificial Sequence
  Peptide Derived from Human Papillomavirus
RIELTVESSADDLRT

SEQ ID NO: 50794 - protein, 15 aa, Artificial Sequence
  Peptide Derived from Human Papillomavirus
VDLLCYEQLSESEEE

SEQ ID NO: 50795 - protein, 15 aa, Artificial Sequence
  Peptide Derived from Human Papillomavirus
ARVVNTDDYVSRTSI

SEQ ID NO: 50796 - protein, 15 aa, Artificial Sequence
  Peptide Derived from Human Papillomavirus
FFCLRREQLFARHFW

SEQ ID NO: 50797 - protein, 15 aa, Artificial Sequence
  Peptide Derived from Human Papillomavirus
GDTVPTDLYIKGTSA

SEQ ID NO: 50798 - protein, 15 aa, Artificial Sequence
  Peptide Derived from Human Papillomavirus
KCEVPLDICQSICKY

SEQ ID NO: 50799 - protein, 15 aa, Artificial Sequence
  Peptide Derived from Human Papillomavirus
KEKFSSDLDQYPLGR

SEQ ID NO: 50800 - protein, 15 aa, Artificial Sequence
  Peptide Derived from Human Papillomavirus
KNTIIEDGDMVDTGY

SEQ ID NO: 50801 - protein, 15 aa, Artificial Sequence
  Peptide Derived from Human Papillomavirus
RAGVMGDTVPTDLYI

SEQ ID NO: 50802 - protein, 15 aa, Artificial Sequence
  Peptide Derived from Human Papillomavirus
STIYNPETQRLVWAC

SEQ ID NO: 50803 - protein, 15 aa, Artificial Sequence
  Peptide Derived from Human Papillomavirus
TITLTAEVMSYIHSM

SEQ ID NO: 50804 - protein, 15 aa, Artificial Sequence
  Peptide Derived from Human Papillomavirus
WACVGMEIGRGQPLG

SEQ ID NO: 50805 - protein, 15 aa, Artificial Sequence
  Peptide Derived from Human Papillomavirus
YLQMSADPYGDSMFF

SEQ ID NO: 50806 - protein, 15 aa, Artificial Sequence
  Peptide Derived from Human Papillomavirus
DTTLSFEPTSNVPDS

SEQ ID NO: 50807 - protein, 12 aa, Artificial Sequence
  Peptide Derived from Human Papillomavirus
IPYFFADGFVAA

SEQ ID NO: 50808 - protein, 15 aa, Artificial Sequence
  Peptide Derived from Human Papillomavirus
IVTLVEDSSVVASGA

SEQ ID NO: 50809 - protein, 15 aa, Artificial Sequence
  Peptide Derived from Human Papillomavirus
LFDVYADFPPPASTT

SEQ ID NO: 50810 - protein, 15 aa, Artificial Sequence
  Peptide Derived from Human Papillomavirus
RPPVVIEPVGPTDPS

SEQ ID NO: 50811 - protein, 15 aa, Artificial Sequence
  Peptide Derived from Human Papillomavirus
RVHFYHDISPIAATE

SEQ ID NO: 50812 - protein, 15 aa, Artificial Sequence
  Peptide Derived from Human Papillomavirus
SSLVTFDNPAYEPLD

SEQ ID NO: 50813 - protein, 15 aa, Artificial Sequence
  Peptide Derived from Human Papillomavirus
ESIYCPDSVSSTCRY

SEQ ID NO: 50814 - protein, 15 aa, Artificial Sequence
  Peptide Derived from Human Papillomavirus
EVHMENESIYCPDSV

SEQ ID NO: 50815 - protein, 15 aa, Artificial Sequence
  Peptide Derived from Human Papillomavirus
EVQIALESLSTTIYN

SEQ ID NO: 50816 - protein, 15 aa, Artificial Sequence
  Peptide Derived from Human Papillomavirus
HIEVWFDGSKNNCMQ

SEQ ID NO: 50817 - protein, 15 aa, Artificial Sequence
  Peptide Derived from Human Papillomavirus
HKTYYTDFEQEAKKF

SEQ ID NO: 50818 - protein, 15 aa, Artificial Sequence
  Peptide Derived from Human Papillomavirus
ITIIYKDETQRNSFL

SEQ ID NO: 50819 - protein, 15 aa, Artificial Sequence
  Peptide Derived from Human Papillomavirus
IWEVHMENESIYCPD

SEQ ID NO: 50820 - protein, 15 aa, Artificial Sequence
  Peptide Derived from Human Papillomavirus
KKCFKKEGQHIEVWF

SEQ ID NO: 50821 - protein, 15 aa, Artificial Sequence
  Peptide Derived from Human Papillomavirus
TIIYKDETQRNSFLS

SEQ ID NO: 50822 - protein, 15 aa, Artificial Sequence
  Peptide Derived from Human Papillomavirus
TTIYNNEEWTLRDTC

SEQ ID NO: 50823 - protein, 15 aa, Artificial Sequence
  Peptide Derived from Human Papillomavirus
VVHLKGEPNRLKCCR

SEQ ID NO: 50824 - protein, 15 aa, Artificial Sequence
  Peptide Derived from Human Papillomavirus
YIYYNGDCGWQKVCS

SEQ ID NO: 50825 - protein, 15 aa, Artificial Sequence
  Peptide Derived from Human Papillomavirus
YKTLFVDVTSTYHWT

SEQ ID NO: 50826 - protein, 15 aa, Artificial Sequence
  Peptide Derived from Human Papillomavirus
KLVYRDDFPYAVCRV

SEQ ID NO: 50827 - protein, 15 aa, Artificial Sequence
  Peptide Derived from Human Papillomavirus
LKLVYRDDFPYAVCR

SEQ ID NO: 50828 - protein, 15 aa, Artificial Sequence
  Peptide Derived from Human Papillomavirus
KFVVQLDIQSTKEDL

SEQ ID NO: 50829 - protein, 15 aa, Artificial Sequence
  Peptide Derived from Human Papillomavirus
LQDVVLELTPQTEID

SEQ ID NO: 50830 - protein, 15 aa, Artificial Sequence
  Peptide Derived from Human Papillomavirus
GETIPAELYLKGSNG

SEQ ID NO: 50831 - protein, 15 aa, Artificial Sequence
  Peptide Derived from Human Papillomavirus
GLCIFLDVGAVNVFP

SEQ ID NO: 50832 - protein, 15 aa, Artificial Sequence
  Peptide Derived from Human Papillomavirus
GSMITSEAQLFNKPY

SEQ ID NO: 50833 - protein, 15 aa, Artificial Sequence
  Peptide Derived from Human Papillomavirus
KAEVPLDIVQSTCKY

SEQ ID NO: 50834 - protein, 15 aa, Artificial Sequence
  Peptide Derived from Human Papillomavirus
KITLSAEVMAYLHNM

SEQ ID NO: 50835 - protein, 15 aa, Artificial Sequence
  Peptide Derived from Human Papillomavirus
MMYIYRDPPLHYGLC

SEQ ID NO: 50836 - protein, 15 aa, Artificial Sequence
  Peptide Derived from Human Papillomavirus
NANLLEDWNIGLSPP

SEQ ID NO: 50837 - protein, 15 aa, Artificial Sequence
  Peptide Derived from Human Papillomavirus
QDSFSTDLDQFPLGR

SEQ ID NO: 50838 - protein, 15 aa, Artificial Sequence
  Peptide Derived from Human Papillomavirus
SKVVATDSYVKRTSI

SEQ ID NO: 50839 - protein, 15 aa, Artificial Sequence
  Peptide Derived from Human Papillomavirus
TNIYNPDQERLVWAC

SEQ ID NO: 50840 - protein, 15 aa, Artificial Sequence
  Peptide Derived from Human Papillomavirus
WACVGLEVGRGQPLG

SEQ ID NO: 50841 - protein, 15 aa, Artificial Sequence
  Peptide Derived from Human Papillomavirus
WFYLRREQLFARHYF

SEQ ID NO: 50842 - protein, 15 aa, Artificial Sequence
  Peptide Derived from Human Papillomavirus
YLKMSADAYGDSMWF

SEQ ID NO: 50843 - protein, 15 aa, Artificial Sequence
  Peptide Derived from Human Papillomavirus
YYSVTKDNTKTNIPK

SEQ ID NO: 50844 - protein, 15 aa, Artificial Sequence
  Peptide Derived from Human Papillomavirus
ATLVSADNPLFEGTD

SEQ ID NO: 50845 - protein, 12 aa, Artificial Sequence
  Peptide Derived from Human Papillomavirus
IPYFFADGDVAA

SEQ ID NO: 50846 - protein, 15 aa, Artificial Sequence
  Peptide Derived from Human Papillomavirus
IVTLVEESSVIESGA

SEQ ID NO: 50847 - protein, 15 aa, Artificial Sequence
  Peptide Derived from Human Papillomavirus
PSGVAPDPDFMNIVA

SEQ ID NO: 50848 - protein, 15 aa, Artificial Sequence
  Peptide Derived from Human Papillomavirus
PYDVTHDVYIQGSSF

SEQ ID NO: 50849 - protein, 15 aa, Artificial Sequence
  Peptide Derived from Human Papillomavirus
RPPIVVESVGPTDPS

SEQ ID NO: 50850 - protein, 15 aa, Artificial Sequence
  Peptide Derived from Human Papillomavirus
RVHYYYDISPIAQAE

SEQ ID NO: 50851 - protein, 15 aa, Artificial Sequence
  Peptide Derived from Human Papillomavirus
TNPLFIDPPVIEAPQ

SEQ ID NO: 50852 - protein, 15 aa, Artificial Sequence
  Peptide Derived from Human Papillomavirus
YANIDDEAPGLSSQS

SEQ ID NO: 50853 - protein, 9 aa, Artificial Sequence
  Peptide Derived from Human Papillomavirus
YIDDNLRNA

SEQ ID NO: 50854 - protein, 9 aa, Artificial Sequence
  Peptide Derived from Human Papillomavirus
IVDDSEIAY

SEQ ID NO: 50855 - protein, 9 aa, Artificial Sequence
  Peptide Derived from Human Papillomavirus
ISDDENEND

SEQ ID NO: 50856 - protein, 9 aa, Artificial Sequence
  Peptide Derived from Human Papillomavirus
VYGDTPEWI

SEQ ID NO: 50857 - protein, 9 aa, Artificial Sequence
  Peptide Derived from Human Papillomavirus
MLDDATVPC

SEQ ID NO: 50858 - protein, 9 aa, Artificial Sequence
  Peptide Derived from Human Papillomavirus
ICIEKQSRA

SEQ ID NO: 50859 - protein, 9 aa, Artificial Sequence
  Peptide Derived from Human Papillomavirus
FYVEAVVEK

SEQ ID NO: 50860 - protein, 9 aa, Artificial Sequence
  Peptide Derived from Human Papillomavirus
MMIEPPKLR

SEQ ID NO: 50861 - protein, 9 aa, Artificial Sequence
  Peptide Derived from Human Papillomavirus
FPFDENGNP

SEQ ID NO: 50862 - protein, 9 aa, Artificial Sequence
  Peptide Derived from Human Papillomavirus
IVKDCATMC

SEQ ID NO: 50863 - protein, 9 aa, Artificial Sequence
  Peptide Derived from Human Papillomavirus
YDNDIVDDS

SEQ ID NO: 50864 - protein, 9 aa, Artificial Sequence
  Peptide Derived from Human Papillomavirus
LHEDEDKEN

SEQ ID NO: 50865 - protein, 9 aa, Artificial Sequence
  Peptide Derived from Human Papillomavirus
FESEDSGYG

SEQ ID NO: 50866 - protein, 9 aa, Artificial Sequence
  Peptide Derived from Human Papillomavirus
IVNDNDYLT

SEQ ID NO: 50867 - protein, 9 aa, Artificial Sequence
  Peptide Derived from Human Papillomavirus
FPNEFPFDE

SEQ ID NO: 50868 - protein, 9 aa, Artificial Sequence
  Peptide Derived from Human Papillomavirus
YRCDRVDDG

SEQ ID NO: 50869 - protein, 9 aa, Artificial Sequence
  Peptide Derived from Human Papillomavirus
LGTEETQTT

SEQ ID NO: 50870 - protein, 9 aa, Artificial Sequence
  Peptide Derived from Human Papillomavirus
LTLETIYNS

SEQ ID NO: 50871 - protein, 9 aa, Artificial Sequence
  Peptide Derived from Human Papillomavirus
FDGDICNTM

SEQ ID NO: 50872 - protein, 9 aa, Artificial Sequence
  Peptide Derived from Human Papillomavirus
FKDDAEKYS

SEQ ID NO: 50873 - protein, 9 aa, Artificial Sequence
  Peptide Derived from Human Papillomavirus
YVHEGIRTY

SEQ ID NO: 50874 - protein, 9 aa, Artificial Sequence
  Peptide Derived from Human Papillomavirus
ICEEASVTV

SEQ ID NO: 50875 - protein, 9 aa, Artificial Sequence
  Peptide Derived from Human Papillomavirus
LKGDANTLK

SEQ ID NO: 50876 - protein, 9 aa, Artificial Sequence
  Peptide Derived from Human Papillomavirus
LTYDSEWQR

SEQ ID NO: 50877 - protein, 9 aa, Artificial Sequence
  Peptide Derived from Human Papillomavirus
YTVEVQFDG

SEQ ID NO: 50878 - protein, 9 aa, Artificial Sequence
  Peptide Derived from Human Papillomavirus
VSLEVYLTA

SEQ ID NO: 50879 - protein, 9 aa, Artificial Sequence
  Peptide Derived from Human Papillomavirus
YENDSTDLR

SEQ ID NO: 50880 - protein, 9 aa, Artificial Sequence
  Peptide Derived from Human Papillomavirus
YSNEKWTLQ

SEQ ID NO: 50881 - protein, 9 aa, Artificial Sequence
  Peptide Derived from Human Papillomavirus
VCQDKILTH

SEQ ID NO: 50882 - protein, 9 aa, Artificial Sequence
  Peptide Derived from Human Papillomavirus
YICEEASVT

SEQ ID NO: 50883 - protein, 9 aa, Artificial Sequence
  Peptide Derived from Human Papillomavirus
LHRDSVDSA

SEQ ID NO: 50884 - protein, 9 aa, Artificial Sequence
  Peptide Derived from Human Papillomavirus
YDSEWQRDQ

SEQ ID NO: 50885 - protein, 9 aa, Artificial Sequence
  Peptide Derived from Human Papillomavirus
VQFDGDICN

SEQ ID NO: 50886 - protein, 9 aa, Artificial Sequence
  Peptide Derived from Human Papillomavirus
MRLECAIYY

SEQ ID NO: 50887 - protein, 9 aa, Artificial Sequence
  Peptide Derived from Human Papillomavirus
IILECVYCK

SEQ ID NO: 50888 - protein, 9 aa, Artificial Sequence
  Peptide Derived from Human Papillomavirus
VYRDGNPYA

SEQ ID NO: 50889 - protein, 9 aa, Artificial Sequence
  Peptide Derived from Human Papillomavirus
LCTELQTTI

SEQ ID NO: 50890 - protein, 9 aa, Artificial Sequence
  Peptide Derived from Human Papillomavirus
LRREVYDFA

SEQ ID NO: 50891 - protein, 9 aa, Artificial Sequence
  Peptide Derived from Human Papillomavirus
MFQDPQERP

SEQ ID NO: 50892 - protein, 9 aa, Artificial Sequence
  Peptide Derived from Human Papillomavirus
MHGDTPTLH

SEQ ID NO: 50893 - protein, 9 aa, Artificial Sequence
  Peptide Derived from Human Papillomavirus
YMLDLQPET

SEQ ID NO: 50894 - protein, 9 aa, Artificial Sequence
  Peptide Derived from Human Papillomavirus
LQPETTDLY

SEQ ID NO: 50895 - protein, 9 aa, Artificial Sequence
  Peptide Derived from Human Papillomavirus
YCYEQLNDS

SEQ ID NO: 50896 - protein, 9 aa, Artificial Sequence
  Peptide Derived from Human Papillomavirus
LRREQMFVR

SEQ ID NO: 50897 - protein, 9 aa, Artificial Sequence
  Peptide Derived from Human Papillomavirus
VPDDLYIKG

SEQ ID NO: 50898 - protein, 9 aa, Artificial Sequence
  Peptide Derived from Human Papillomavirus
VTSDAQIFN

SEQ ID NO: 50899 - protein, 9 aa, Artificial Sequence
  Peptide Derived from Human Papillomavirus
VIQDGDMVD

SEQ ID NO: 50900 - protein, 9 aa, Artificial Sequence
  Peptide Derived from Human Papillomavirus
YENDVNVYH

SEQ ID NO: 50901 - protein, 9 aa, Artificial Sequence
  Peptide Derived from Human Papillomavirus
FSADLDQFP

SEQ ID NO: 50902 - protein, 9 aa, Artificial Sequence
  Peptide Derived from Human Papillomavirus
LTADVMTYI

SEQ ID NO: 50903 - protein, 9 aa, Artificial Sequence
  Peptide Derived from Human Papillomavirus
VPLDICTSI

SEQ ID NO: 50904 - protein, 9 aa, Artificial Sequence
  Peptide Derived from Human Papillomavirus
ILEDWNFGL

SEQ ID NO: 50905 - protein, 9 aa, Artificial Sequence
  Peptide Derived from Human Papillomavirus
VSTDEYVAR

SEQ ID NO: 50906 - protein, 9 aa, Artificial Sequence
  Peptide Derived from Human Papillomavirus
LPSEATVYL

SEQ ID NO: 50907 - protein, 9 aa, Artificial Sequence
  Peptide Derived from Human Papillomavirus
YNPDTQRLV

SEQ ID NO: 50908 - protein, 9 aa, Artificial Sequence
  Peptide Derived from Human Papillomavirus
VGVEVGRGQ

SEQ ID NO: 50909 - protein, 9 aa, Artificial Sequence
  Peptide Derived from Human Papillomavirus
MVSEPYGDS

SEQ ID NO: 50910 - protein, 9 aa, Artificial Sequence
  Peptide Derived from Human Papillomavirus
FITDTSTTP

SEQ ID NO: 50911 - protein, 9 aa, Artificial Sequence
  Peptide Derived from Human Papillomavirus
LVEETSFID

SEQ ID NO: 50912 - protein, 9 aa, Artificial Sequence
  Peptide Derived from Human Papillomavirus
YYYDFSTID

SEQ ID NO: 50913 - protein, 9 aa, Artificial Sequence
  Peptide Derived from Human Papillomavirus
FFSDVSLAA

SEQ ID NO: 50914 - protein, 9 aa, Artificial Sequence
  Peptide Derived from Human Papillomavirus
IYADDFITD

SEQ ID NO: 50915 - protein, 9 aa, Artificial Sequence
  Peptide Derived from Human Papillomavirus
IIADAGDFY

SEQ ID NO: 50916 - protein, 9 aa, Artificial Sequence
  Peptide Derived from Human Papillomavirus
LTVDPVGPS

SEQ ID NO: 50917 - protein, 9 aa, Artificial Sequence
  Peptide Derived from Human Papillomavirus
IAPDPDFLD

SEQ ID NO: 50918 - protein, 9 aa, Artificial Sequence
  Peptide Derived from Human Papillomavirus
ITYDNPAYE

SEQ ID NO: 50919 - protein, 9 aa, Artificial Sequence
  Peptide Derived from Human Papillomavirus
IPPDVSGFS

SEQ ID NO: 50920 - protein, 9 aa, Artificial Sequence
  Peptide Derived from Human Papillomavirus
YADDFITDT

SEQ ID NO: 50921 - protein, 9 aa, Artificial Sequence
  Peptide Derived from Human Papillomavirus
IPMDTFIVS

SEQ ID NO: 50922 - protein, 9 aa, Artificial Sequence
  Peptide Derived from Human Papillomavirus
IDVDNTLYF

SEQ ID NO: 50923 - protein, 9 aa, Artificial Sequence
  Peptide Derived from Human Papillomavirus
VHNDAQVLH

SEQ ID NO: 50924 - protein, 9 aa, Artificial Sequence
  Peptide Derived from Human Papillomavirus
LTDESDMAF

SEQ ID NO: 50925 - protein, 9 aa, Artificial Sequence
  Peptide Derived from Human Papillomavirus
MAFEYALLA

SEQ ID NO: 50926 - protein, 9 aa, Artificial Sequence
  Peptide Derived from Human Papillomavirus
LLADSNSNA

SEQ ID NO: 50927 - protein, 9 aa, Artificial Sequence
  Peptide Derived from Human Papillomavirus
ISDDEDENA

SEQ ID NO: 50928 - protein, 9 aa, Artificial Sequence
  Peptide Derived from Human Papillomavirus
LEVDTELSP

SEQ ID NO: 50929 - protein, 9 aa, Artificial Sequence
  Peptide Derived from Human Papillomavirus
VMGDTPEWI

SEQ ID NO: 50930 - protein, 9 aa, Artificial Sequence
  Peptide Derived from Human Papillomavirus
MLDDATTTC

SEQ ID NO: 50931 - protein, 9 aa, Artificial Sequence
  Peptide Derived from Human Papillomavirus
VFKDTYGLS

SEQ ID NO: 50932 - protein, 9 aa, Artificial Sequence
  Peptide Derived from Human Papillomavirus
FPFDKNGNP

SEQ ID NO: 50933 - protein, 9 aa, Artificial Sequence
  Peptide Derived from Human Papillomavirus
YLKDCATMC

SEQ ID NO: 50934 - protein, 9 aa, Artificial Sequence
  Peptide Derived from Human Papillomavirus
FDNELTDES

SEQ ID NO: 50935 - protein, 9 aa, Artificial Sequence
  Peptide Derived from Human Papillomavirus
LHEEEEDAD

SEQ ID NO: 50936 - protein, 9 aa, Artificial Sequence
  Peptide Derived from Human Papillomavirus
VDTELSPRL

SEQ ID NO: 50937 - protein, 9 aa, Artificial Sequence
  Peptide Derived from Human Papillomavirus
VISDDEDEN

SEQ ID NO: 50938 - protein, 9 aa, Artificial Sequence
  Peptide Derived from Human Papillomavirus
FWLEPLTDT

SEQ ID NO: 50939 - protein, 9 aa, Artificial Sequence
  Peptide Derived from Human Papillomavirus
FKSDKTTCT

SEQ ID NO: 50940 - protein, 9 aa, Artificial Sequence
  Peptide Derived from Human Papillomavirus
YVKEGYNTF

SEQ ID NO: 50941 - protein, 9 aa, Artificial Sequence
  Peptide Derived from Human Papillomavirus
LKGDRNSLK

SEQ ID NO: 50942 - protein, 9 aa, Artificial Sequence
  Peptide Derived from Human Papillomavirus
VAWDSVYYM

SEQ ID NO: 50943 - protein, 9 aa, Artificial Sequence
  Peptide Derived from Human Papillomavirus
YKTEDWTLQ

SEQ ID NO: 50944 - protein, 9 aa, Artificial Sequence
  Peptide Derived from Human Papillomavirus
YMTDAGTWD

SEQ ID NO: 50945 - protein, 9 aa, Artificial Sequence
  Peptide Derived from Human Papillomavirus
VYFDGNKDN

SEQ ID NO: 50946 - protein, 9 aa, Artificial Sequence
  Peptide Derived from Human Papillomavirus
YHSETQRTK

SEQ ID NO: 50947 - protein, 9 aa, Artificial Sequence
  Peptide Derived from Human Papillomavirus
IRWENAIFF

SEQ ID NO: 50948 - protein, 9 aa, Artificial Sequence
  Peptide Derived from Human Papillomavirus
FKSECEKYG

SEQ ID NO: 50949 - protein, 9 aa, Artificial Sequence
  Peptide Derived from Human Papillomavirus
VYRDSIPHA

SEQ ID NO: 50950 - protein, 9 aa, Artificial Sequence
  Peptide Derived from Human Papillomavirus
LCTELNTSL

SEQ ID NO: 50951 - protein, 9 aa, Artificial Sequence
  Peptide Derived from Human Papillomavirus
VYGDTLEKL

SEQ ID NO: 50952 - protein, 9 aa, Artificial Sequence
  Peptide Derived from Human Papillomavirus
LHLEPQNEI

SEQ ID NO: 50953 - protein, 9 aa, Artificial Sequence
  Peptide Derived from Human Papillomavirus
IPVDLLCHE

SEQ ID NO: 50954 - protein, 9 aa, Artificial Sequence
  Peptide Derived from Human Papillomavirus
LVVESSADD

SEQ ID NO: 50955 - protein, 9 aa, Artificial Sequence
  Peptide Derived from Human Papillomavirus
LCHEQLSDS

SEQ ID NO: 50956 - protein, 9 aa, Artificial Sequence
  Peptide Derived from Human Papillomavirus
VNTDDYVTP

SEQ ID NO: 50957 - protein, 9 aa, Artificial Sequence
  Peptide Derived from Human Papillomavirus
LRREQLFAR

SEQ ID NO: 50958 - protein, 9 aa, Artificial Sequence
  Peptide Derived from Human Papillomavirus
VTSDSQLFN

SEQ ID NO: 50959 - protein, 9 aa, Artificial Sequence
  Peptide Derived from Human Papillomavirus
VPLDICQSI

SEQ ID NO: 50960 - protein, 9 aa, Artificial Sequence
  Peptide Derived from Human Papillomavirus
FSLDLDQYP

SEQ ID NO: 50961 - protein, 9 aa, Artificial Sequence
  Peptide Derived from Human Papillomavirus
LDLDQYPLG

SEQ ID NO: 50962 - protein, 9 aa, Artificial Sequence
  Peptide Derived from Human Papillomavirus
VLEDGDMVD

SEQ ID NO: 50963 - protein, 9 aa, Artificial Sequence
  Peptide Derived from Human Papillomavirus
ILEDWNFGV

SEQ ID NO: 50964 - protein, 9 aa, Artificial Sequence
  Peptide Derived from Human Papillomavirus
LTADVMSYI

SEQ ID NO: 50965 - protein, 9 aa, Artificial Sequence
  Peptide Derived from Human Papillomavirus
YNPETQRLV

SEQ ID NO: 50966 - protein, 9 aa, Artificial Sequence
  Peptide Derived from Human Papillomavirus
MSADPYGDS

SEQ ID NO: 50967 - protein, 9 aa, Artificial Sequence
  Peptide Derived from Human Papillomavirus
YADDMDPAV

SEQ ID NO: 50968 - protein, 9 aa, Artificial Sequence
  Peptide Derived from Human Papillomavirus
LIEDSSVVT

SEQ ID NO: 50969 - protein, 9 aa, Artificial Sequence
  Peptide Derived from Human Papillomavirus
IYADDMDPA

SEQ ID NO: 50970 - protein, 9 aa, Artificial Sequence
  Peptide Derived from Human Papillomavirus
VVIEPVGPT

SEQ ID NO: 50971 - protein, 9 aa, Artificial Sequence
  Peptide Derived from Human Papillomavirus
FYHDISPIA

SEQ ID NO: 50972 - protein, 9 aa, Artificial Sequence
  Peptide Derived from Human Papillomavirus
ITYDNPAFE

SEQ ID NO: 50973 - protein, 9 aa, Artificial Sequence
  Peptide Derived from Human Papillomavirus
FFADGFVAA

SEQ ID NO: 50974 - protein, 9 aa, Artificial Sequence
  Peptide Derived from Human Papillomavirus
VSDEGDWRD

SEQ ID NO: 50975 - protein, 9 aa, Artificial Sequence
  Peptide Derived from Human Papillomavirus
VMDDSEIAY

SEQ ID NO: 50976 - protein, 9 aa, Artificial Sequence
  Peptide Derived from Human Papillomavirus
ISEDENEDS

SEQ ID NO: 50977 - protein, 9 aa, Artificial Sequence
  Peptide Derived from Human Papillomavirus
VYGETPEWI

SEQ ID NO: 50978 - protein, 9 aa, Artificial Sequence
  Peptide Derived from Human Papillomavirus
MLDDATTPC

SEQ ID NO: 50979 - protein, 9 aa, Artificial Sequence
  Peptide Derived from Human Papillomavirus
ITIEKLLEK

SEQ ID NO: 50980 - protein, 9 aa, Artificial Sequence
  Peptide Derived from Human Papillomavirus
ICIENNSKT

SEQ ID NO: 50981 - protein, 9 aa, Artificial Sequence
  Peptide Derived from Human Papillomavirus
FYVEAVIDR

SEQ ID NO: 50982 - protein, 9 aa, Artificial Sequence
  Peptide Derived from Human Papillomavirus
FPFDKNGNP

SEQ ID NO: 50983 - protein, 9 aa, Artificial Sequence
  Peptide Derived from Human Papillomavirus
IVKDCGTMC

SEQ ID NO: 50984 - protein, 9 aa, Artificial Sequence
  Peptide Derived from Human Papillomavirus
VQVEEQQTT

SEQ ID NO: 50985 - protein, 9 aa, Artificial Sequence
  Peptide Derived from Human Papillomavirus
YDNDVMDDS

SEQ ID NO: 50986 - protein, 9 aa, Artificial Sequence
  Peptide Derived from Human Papillomavirus
LHEEEDKEN

SEQ ID NO: 50987 - protein, 9 aa, Artificial Sequence
  Peptide Derived from Human Papillomavirus
MMLETLNNT

SEQ ID NO: 50988 - protein, 9 aa, Artificial Sequence
  Peptide Derived from Human Papillomavirus
FSSDEISFA

SEQ ID NO: 50989 - protein, 9 aa, Artificial Sequence
  Peptide Derived from Human Papillomavirus
LCIDGQCTV

SEQ ID NO: 50990 - protein, 9 aa, Artificial Sequence
  Peptide Derived from Human Papillomavirus
LKGDANILK

SEQ ID NO: 50991 - protein, 9 aa, Artificial Sequence
  Peptide Derived from Human Papillomavirus
YTVEVQFDG

SEQ ID NO: 50992 - protein, 9 aa, Artificial Sequence
  Peptide Derived from Human Papillomavirus
LRGDSVDSV

SEQ ID NO: 50993 - protein, 9 aa, Artificial Sequence
  Peptide Derived from Human Papillomavirus
YKNEDWTMQ

SEQ ID NO: 50994 - protein, 9 aa, Artificial Sequence
  Peptide Derived from Human Papillomavirus
VFPESVFSS

SEQ ID NO: 50995 - protein, 9 aa, Artificial Sequence
  Peptide Derived from Human Papillomavirus
VCQDKILEH

SEQ ID NO: 50996 - protein, 9 aa, Artificial Sequence
  Peptide Derived from Human Papillomavirus
VQFDGDVHN

SEQ ID NO: 50997 - protein, 9 aa, Artificial Sequence
  Peptide Derived from Human Papillomavirus
IRLECVLMY

SEQ ID NO: 50998 - protein, 9 aa, Artificial Sequence
  Peptide Derived from Human Papillomavirus
IPYDELRLN

SEQ ID NO: 50999 - protein, 9 aa, Artificial Sequence
  Peptide Derived from Human Papillomavirus
VYRDDTPHG

SEQ ID NO: 51000 - protein, 9 aa, Artificial Sequence
  Peptide Derived from Human Papillomavirus
YRDDTPHGV

SEQ ID NO: 51001 - protein, 9 aa, Artificial Sequence
  Peptide Derived from Human Papillomavirus
MRGETPTLQ

SEQ ID NO: 51002 - protein, 9 aa, Artificial Sequence
  Peptide Derived from Human Papillomavirus
ILQELLMGS

SEQ ID NO: 51003 - protein, 9 aa, Artificial Sequence
  Peptide Derived from Human Papillomavirus
YVLDLQPEA

SEQ ID NO: 51004 - protein, 9 aa, Artificial Sequence
  Peptide Derived from Human Papillomavirus
LQPEATDLH

SEQ ID NO: 51005 - protein, 9 aa, Artificial Sequence
  Peptide Derived from Human Papillomavirus
LRREQMFVR

SEQ ID NO: 51006 - protein, 9 aa, Artificial Sequence
  Peptide Derived from Human Papillomavirus
VPTDLYIKG

SEQ ID NO: 51007 - protein, 9 aa, Artificial Sequence
  Peptide Derived from Human Papillomavirus
VTSDAQIFN

SEQ ID NO: 51008 - protein, 9 aa, Artificial Sequence
  Peptide Derived from Human Papillomavirus
VFWEVNLKE

SEQ ID NO: 51009 - protein, 9 aa, Artificial Sequence
  Peptide Derived from Human Papillomavirus
FSADLDQFP

SEQ ID NO: 51010 - protein, 9 aa, Artificial Sequence
  Peptide Derived from Human Papillomavirus
LSADIMTYI

SEQ ID NO: 51011 - protein, 9 aa, Artificial Sequence
  Peptide Derived from Human Papillomavirus
VIQDGDMVD

SEQ ID NO: 51012 - protein, 9 aa, Artificial Sequence
  Peptide Derived from Human Papillomavirus
VPLDICNSI

SEQ ID NO: 51013 - protein, 9 aa, Artificial Sequence
  Peptide Derived from Human Papillomavirus
ILEDWNFGL

SEQ ID NO: 51014 - protein, 9 aa, Artificial Sequence
  Peptide Derived from Human Papillomavirus
VSTDEYVTR

SEQ ID NO: 51015 - protein, 9 aa, Artificial Sequence
  Peptide Derived from Human Papillomavirus
YNPETQRLV

SEQ ID NO: 51016 - protein, 9 aa, Artificial Sequence
  Peptide Derived from Human Papillomavirus
VGLEVGRGQ

SEQ ID NO: 51017 - protein, 9 aa, Artificial Sequence
  Peptide Derived from Human Papillomavirus
MVAEPYGDT

SEQ ID NO: 51018 - protein, 9 aa, Artificial Sequence
  Peptide Derived from Human Papillomavirus
FTVDTPATH

SEQ ID NO: 51019 - protein, 9 aa, Artificial Sequence
  Peptide Derived from Human Papillomavirus
VPIEHAPTQ

SEQ ID NO: 51020 - protein, 9 aa, Artificial Sequence
  Peptide Derived from Human Papillomavirus
LVEESGIVD

SEQ ID NO: 51021 - protein, 9 aa, Artificial Sequence
  Peptide Derived from Human Papillomavirus
ITYENPAYE

SEQ ID NO: 51022 - protein, 9 aa, Artificial Sequence
  Peptide Derived from Human Papillomavirus
IYADTDFTV

SEQ ID NO: 51023 - protein, 9 aa, Artificial Sequence
  Peptide Derived from Human Papillomavirus
IFVDGGDFY

SEQ ID NO: 51024 - protein, 9 aa, Artificial Sequence
  Peptide Derived from Human Papillomavirus
VSIDPVGPL

SEQ ID NO: 51025 - protein, 9 aa, Artificial Sequence
  Peptide Derived from Human Papillomavirus
YYYDISSIN

SEQ ID NO: 51026 - protein, 9 aa, Artificial Sequence
  Peptide Derived from Human Papillomavirus
IAPDPDFLD

SEQ ID NO: 51027 - protein, 9 aa, Artificial Sequence
  Peptide Derived from Human Papillomavirus
FFTDVSVAA

SEQ ID NO: 51028 - protein, 9 aa, Artificial Sequence
  Peptide Derived from Human Papillomavirus
IPMDTFIVS

SEQ ID NO: 51029 - protein, 9 aa, Artificial Sequence
  Peptide Derived from Human Papillomavirus
VNAEESLYF

SEQ ID NO: 51030 - protein, 9 aa, Artificial Sequence
  Peptide Derived from Human Papillomavirus
LTDDSDIAY

SEQ ID NO: 51031 - protein, 9 aa, Artificial Sequence
  Peptide Derived from Human Papillomavirus
VSCETNVDS

SEQ ID NO: 51032 - protein, 9 aa, Artificial Sequence
  Peptide Derived from Human Papillomavirus
IQADTEAAR

SEQ ID NO: 51033 - protein, 9 aa, Artificial Sequence
  Peptide Derived from Human Papillomavirus
MVIEPPKLR

SEQ ID NO: 51034 - protein, 9 aa, Artificial Sequence
  Peptide Derived from Human Papillomavirus
ISEDEDETA

SEQ ID NO: 51035 - protein, 9 aa, Artificial Sequence
  Peptide Derived from Human Papillomavirus
MIDDVTPIS

SEQ ID NO: 51036 - protein, 9 aa, Artificial Sequence
  Peptide Derived from Human Papillomavirus
LIEEEDKEN

SEQ ID NO: 51037 - protein, 9 aa, Artificial Sequence
  Peptide Derived from Human Papillomavirus
FPFDENGNP

SEQ ID NO: 51038 - protein, 9 aa, Artificial Sequence
  Peptide Derived from Human Papillomavirus
FIDDSMENS

SEQ ID NO: 51039 - protein, 9 aa, Artificial Sequence
  Peptide Derived from Human Papillomavirus
LTCDRGIII

SEQ ID NO: 51040 - protein, 9 aa, Artificial Sequence
  Peptide Derived from Human Papillomavirus
IVKDCGIMC

SEQ ID NO: 51041 - protein, 9 aa, Artificial Sequence
  Peptide Derived from Human Papillomavirus
YDNELTDDS

SEQ ID NO: 51042 - protein, 9 aa, Artificial Sequence
  Peptide Derived from Human Papillomavirus
VGDDSEVSC

SEQ ID NO: 51043 - protein, 9 aa, Artificial Sequence
  Peptide Derived from Human Papillomavirus
YIDDYMRNA

SEQ ID NO: 51044 - protein, 9 aa, Artificial Sequence
  Peptide Derived from Human Papillomavirus
FEVEAVIER

SEQ ID NO: 51045 - protein, 9 aa, Artificial Sequence
  Peptide Derived from Human Papillomavirus
FKSDKTSCT

SEQ ID NO: 51046 - protein, 9 aa, Artificial Sequence
  Peptide Derived from Human Papillomavirus
INDENWKSF

SEQ ID NO: 51047 - protein, 9 aa, Artificial Sequence
  Peptide Derived from Human Papillomavirus
IIEEDTCTM

SEQ ID NO: 51048 - protein, 9 aa, Artificial Sequence
  Peptide Derived from Human Papillomavirus
MALETLSKS

SEQ ID NO: 51049 - protein, 9 aa, Artificial Sequence
  Peptide Derived from Human Papillomavirus
FKEDAAKYS

SEQ ID NO: 51050 - protein, 9 aa, Artificial Sequence
  Peptide Derived from Human Papillomavirus
YIIEEDTCT

SEQ ID NO: 51051 - protein, 9 aa, Artificial Sequence
  Peptide Derived from Human Papillomavirus
LKGESNSLK

SEQ ID NO: 51052 - protein, 9 aa, Artificial Sequence
  Peptide Derived from Human Papillomavirus
IEEDTCTMV

SEQ ID NO: 51053 - protein, 9 aa, Artificial Sequence
  Peptide Derived from Human Papillomavirus
YEADKTDLP

SEQ ID NO: 51054 - protein, 9 aa, Artificial Sequence
  Peptide Derived from Human Papillomavirus
IQTDNDNRP

SEQ ID NO: 51055 - protein, 9 aa, Artificial Sequence
  Peptide Derived from Human Papillomavirus
FCADPALDN

SEQ ID NO: 51056 - protein, 9 aa, Artificial Sequence
  Peptide Derived from Human Papillomavirus
FVTEQQQQM

SEQ ID NO: 51057 - protein, 9 aa, Artificial Sequence
  Peptide Derived from Human Papillomavirus
VQYDNDKKN

SEQ ID NO: 51058 - protein, 9 aa, Artificial Sequence
  Peptide Derived from Human Papillomavirus
IRMECALLY

SEQ ID NO: 51059 - protein, 9 aa, Artificial Sequence
  Peptide Derived from Human Papillomavirus
YFKEDAAKY

SEQ ID NO: 51060 - protein, 9 aa, Artificial Sequence
  Peptide Derived from Human Papillomavirus
MFQDTEEKP

SEQ ID NO: 51061 - protein, 9 aa, Artificial Sequence
  Peptide Derived from Human Papillomavirus
VYREGNPFG

SEQ ID NO: 51062 - protein, 9 aa, Artificial Sequence
  Peptide Derived from Human Papillomavirus
YVLDLYPEP

SEQ ID NO: 51063 - protein, 9 aa, Artificial Sequence
  Peptide Derived from Human Papillomavirus
YCYEQLSDS

SEQ ID NO: 51064 - protein, 9 aa, Artificial Sequence
  Peptide Derived from Human Papillomavirus
LYPEPTDLY

SEQ ID NO: 51065 - protein, 9 aa, Artificial Sequence
  Peptide Derived from Human Papillomavirus
VTSDSTYKN

SEQ ID NO: 51066 - protein, 9 aa, Artificial Sequence
  Peptide Derived from Human Papillomavirus
YKNENFKEY

SEQ ID NO: 51067 - protein, 9 aa, Artificial Sequence
  Peptide Derived from Human Papillomavirus
LRREQMFVR

SEQ ID NO: 51068 - protein, 9 aa, Artificial Sequence
  Peptide Derived from Human Papillomavirus
VPDDLYIKG

SEQ ID NO: 51069 - protein, 9 aa, Artificial Sequence
  Peptide Derived from Human Papillomavirus
VTSESQLFN

SEQ ID NO: 51070 - protein, 9 aa, Artificial Sequence
  Peptide Derived from Human Papillomavirus
MNPDILEDW

SEQ ID NO: 51071 - protein, 9 aa, Artificial Sequence
  Peptide Derived from Human Papillomavirus
IIEDGDMVD

SEQ ID NO: 51072 - protein, 9 aa, Artificial Sequence
  Peptide Derived from Human Papillomavirus
FSADLDQFP

SEQ ID NO: 51073 - protein, 9 aa, Artificial Sequence
  Peptide Derived from Human Papillomavirus
VPIDICGST

SEQ ID NO: 51074 - protein, 9 aa, Artificial Sequence
  Peptide Derived from Human Papillomavirus
LTAEVMTYI

SEQ ID NO: 51075 - protein, 9 aa, Artificial Sequence
  Peptide Derived from Human Papillomavirus
ILEDWQFGL

SEQ ID NO: 51076 - protein, 9 aa, Artificial Sequence
  Peptide Derived from Human Papillomavirus
VSTDEYVSR

SEQ ID NO: 51077 - protein, 9 aa, Artificial Sequence
  Peptide Derived from Human Papillomavirus
YNPDTQRLV

SEQ ID NO: 51078 - protein, 9 aa, Artificial Sequence
  Peptide Derived from Human Papillomavirus
VGLEIGRGQ

SEQ ID NO: 51079 - protein, 9 aa, Artificial Sequence
  Peptide Derived from Human Papillomavirus
MTSEPYGDS

SEQ ID NO: 51080 - protein, 9 aa, Artificial Sequence
  Peptide Derived from Human Papillomavirus
VPNEQYELQ

SEQ ID NO: 51081 - protein, 9 aa, Artificial Sequence
  Peptide Derived from Human Papillomavirus
IVVDGADFV

SEQ ID NO: 51082 - protein, 9 aa, Artificial Sequence
  Peptide Derived from Human Papillomavirus
FDPEDTLQF

SEQ ID NO: 51083 - protein, 9 aa, Artificial Sequence
  Peptide Derived from Human Papillomavirus
ITYDNPAFE

SEQ ID NO: 51084 - protein, 9 aa, Artificial Sequence
  Peptide Derived from Human Papillomavirus
LIEETSFIE

SEQ ID NO: 51085 - protein, 9 aa, Artificial Sequence
  Peptide Derived from Human Papillomavirus
VYADDVDNV

SEQ ID NO: 51086 - protein, 9 aa, Artificial Sequence
  Peptide Derived from Human Papillomavirus
YYQDLSPIV

SEQ ID NO: 51087 - protein, 9 aa, Artificial Sequence
  Peptide Derived from Human Papillomavirus
VTVDTVGPL

SEQ ID NO: 51088 - protein, 9 aa, Artificial Sequence
  Peptide Derived from Human Papillomavirus
FPFDTIVVD

SEQ ID NO: 51089 - protein, 9 aa, Artificial Sequence
  Peptide Derived from Human Papillomavirus
VPLDHTVPN

SEQ ID NO: 51090 - protein, 9 aa, Artificial Sequence
  Peptide Derived from Human Papillomavirus
VSTDSSNVT

SEQ ID NO: 51091 - protein, 9 aa, Artificial Sequence
  Peptide Derived from Human Papillomavirus
YADDVDNVH

SEQ ID NO: 51092 - protein, 9 aa, Artificial Sequence
  Peptide Derived from Human Papillomavirus
IPMDTFVVS

SEQ ID NO: 51093 - protein, 9 aa, Artificial Sequence
  Peptide Derived from Human Papillomavirus
IGTDPPTAA

SEQ ID NO: 51094 - protein, 9 aa, Artificial Sequence
  Peptide Derived from Human Papillomavirus
VQNDAQVLH

SEQ ID NO: 51095 - protein, 9 aa, Artificial Sequence
  Peptide Derived from Human Papillomavirus
LTDESDMAF

SEQ ID NO: 51096 - protein, 9 aa, Artificial Sequence
  Peptide Derived from Human Papillomavirus
MLIEPPKLR

SEQ ID NO: 51097 - protein, 9 aa, Artificial Sequence
  Peptide Derived from Human Papillomavirus
ISDDEDETA

SEQ ID NO: 51098 - protein, 9 aa, Artificial Sequence
  Peptide Derived from Human Papillomavirus
LSVDTDLSP

SEQ ID NO: 51099 - protein, 9 aa, Artificial Sequence
  Peptide Derived from Human Papillomavirus
VSGDTPEWI

SEQ ID NO: 51100 - protein, 9 aa, Artificial Sequence
  Peptide Derived from Human Papillomavirus
MLDDATHTC

SEQ ID NO: 51101 - protein, 9 aa, Artificial Sequence
  Peptide Derived from Human Papillomavirus
VFKDIYGLS

SEQ ID NO: 51102 - protein, 9 aa, Artificial Sequence
  Peptide Derived from Human Papillomavirus
FFVETIVEK

SEQ ID NO: 51103 - protein, 9 aa, Artificial Sequence
  Peptide Derived from Human Papillomavirus
FWLEPLADT

SEQ ID NO: 51104 - protein, 9 aa, Artificial Sequence
  Peptide Derived from Human Papillomavirus
FPFDKNGNP

SEQ ID NO: 51105 - protein, 9 aa, Artificial Sequence
  Peptide Derived from Human Papillomavirus
YLKDCAVMC

SEQ ID NO: 51106 - protein, 9 aa, Artificial Sequence
  Peptide Derived from Human Papillomavirus
VDTDLSPRL

SEQ ID NO: 51107 - protein, 9 aa, Artificial Sequence
  Peptide Derived from Human Papillomavirus
FDNDLTDES

SEQ ID NO: 51108 - protein, 9 aa, Artificial Sequence
  Peptide Derived from Human Papillomavirus
LHEDDEDAD

SEQ ID NO: 51109 - protein, 9 aa, Artificial Sequence
  Peptide Derived from Human Papillomavirus
VISDDEDET

SEQ ID NO: 51110 - protein, 9 aa, Artificial Sequence
  Peptide Derived from Human Papillomavirus
FKSDKTTCT

SEQ ID NO: 51111 - protein, 9 aa, Artificial Sequence
  Peptide Derived from Human Papillomavirus
YIKDGDTTY

SEQ ID NO: 51112 - protein, 9 aa, Artificial Sequence
  Peptide Derived from Human Papillomavirus
LKGDKNSLK

SEQ ID NO: 51113 - protein, 9 aa, Artificial Sequence
  Peptide Derived from Human Papillomavirus
VVWDSIYYI

SEQ ID NO: 51114 - protein, 9 aa, Artificial Sequence
  Peptide Derived from Human Papillomavirus
YNNEEWTLQ

SEQ ID NO: 51115 - protein, 9 aa, Artificial Sequence
  Peptide Derived from Human Papillomavirus
YITETGIWD

SEQ ID NO: 51116 - protein, 9 aa, Artificial Sequence
  Peptide Derived from Human Papillomavirus
VYFDGNKDN

SEQ ID NO: 51117 - protein, 9 aa, Artificial Sequence
  Peptide Derived from Human Papillomavirus
YNSEVQRNT

SEQ ID NO: 51118 - protein, 9 aa, Artificial Sequence
  Peptide Derived from Human Papillomavirus
IRLENAILF

SEQ ID NO: 51119 - protein, 9 aa, Artificial Sequence
  Peptide Derived from Human Papillomavirus
FKSECEKYG

SEQ ID NO: 51120 - protein, 9 aa, Artificial Sequence
  Peptide Derived from Human Papillomavirus
VYRDCIAYA

SEQ ID NO: 51121 - protein, 9 aa, Artificial Sequence
  Peptide Derived from Human Papillomavirus
LCTELNTSL

SEQ ID NO: 51122 - protein, 9 aa, Artificial Sequence
  Peptide Derived from Human Papillomavirus
VYGETLEKI

SEQ ID NO: 51123 - protein, 9 aa, Artificial Sequence
  Peptide Derived from Human Papillomavirus
LHLEPQNEL

SEQ ID NO: 51124 - protein, 9 aa, Artificial Sequence
  Peptide Derived from Human Papillomavirus
LTVESSADD

SEQ ID NO: 51125 - protein, 9 aa, Artificial Sequence
  Peptide Derived from Human Papillomavirus
LCYEQLSES

SEQ ID NO: 51126 - protein, 9 aa, Artificial Sequence
  Peptide Derived from Human Papillomavirus
VNTDDYVSR

SEQ ID NO: 51127 - protein, 9 aa, Artificial Sequence
  Peptide Derived from Human Papillomavirus
LRREQLFAR

SEQ ID NO: 51128 - protein, 9 aa, Artificial Sequence
  Peptide Derived from Human Papillomavirus
VPTDLYIKG

SEQ ID NO: 51129 - protein, 9 aa, Artificial Sequence
  Peptide Derived from Human Papillomavirus
VPLDICQSI

SEQ ID NO: 51130 - protein, 9 aa, Artificial Sequence
  Peptide Derived from Human Papillomavirus
FSSDLDQYP

SEQ ID NO: 51131 - protein, 9 aa, Artificial Sequence
  Peptide Derived from Human Papillomavirus
IIEDGDMVD

SEQ ID NO: 51132 - protein, 9 aa, Artificial Sequence
  Peptide Derived from Human Papillomavirus
VMGDTVPTD

SEQ ID NO: 51133 - protein, 9 aa, Artificial Sequence
  Peptide Derived from Human Papillomavirus
YNPETQRLV

SEQ ID NO: 51134 - protein, 9 aa, Artificial Sequence
  Peptide Derived from Human Papillomavirus
LTAEVMSYI

SEQ ID NO: 51135 - protein, 9 aa, Artificial Sequence
  Peptide Derived from Human Papillomavirus
VGMEIGRGQ

SEQ ID NO: 51136 - protein, 9 aa, Artificial Sequence
  Peptide Derived from Human Papillomavirus
MSADPYGDS

SEQ ID NO: 51137 - protein, 9 aa, Artificial Sequence
  Peptide Derived from Human Papillomavirus
LSFEPTSNV

SEQ ID NO: 51138 - protein, 9 aa, Artificial Sequence
  Peptide Derived from Human Papillomavirus
FFADGFVAA

SEQ ID NO: 51139 - protein, 9 aa, Artificial Sequence
  Peptide Derived from Human Papillomavirus
LVEDSSVVA

SEQ ID NO: 51140 - protein, 9 aa, Artificial Sequence
  Peptide Derived from Human Papillomavirus
VYADFPPPA

SEQ ID NO: 51141 - protein, 9 aa, Artificial Sequence
  Peptide Derived from Human Papillomavirus
VVIEPVGPT

SEQ ID NO: 51142 - protein, 9 aa, Artificial Sequence
  Peptide Derived from Human Papillomavirus
FYHDISPIA

SEQ ID NO: 51143 - protein, 9 aa, Artificial Sequence
  Peptide Derived from Human Papillomavirus
VTFDNPAYE

SEQ ID NO: 51144 - protein, 9 aa, Artificial Sequence
  Peptide Derived from Human Papillomavirus
YCPDSVSST

SEQ ID NO: 51145 - protein, 9 aa, Artificial Sequence
  Peptide Derived from Human Papillomavirus
MENESIYCP

SEQ ID NO: 51146 - protein, 9 aa, Artificial Sequence
  Peptide Derived from Human Papillomavirus
IALESLSTT

SEQ ID NO: 51147 - protein, 9 aa, Artificial Sequence
  Peptide Derived from Human Papillomavirus
VWFDGSKNN

SEQ ID NO: 51148 - protein, 9 aa, Artificial Sequence
  Peptide Derived from Human Papillomavirus
YYTDFEQEA

SEQ ID NO: 51149 - protein, 9 aa, Artificial Sequence
  Peptide Derived from Human Papillomavirus
IYKDETQRN

SEQ ID NO: 51150 - protein, 9 aa, Artificial Sequence
  Peptide Derived from Human Papillomavirus
VHMENESIY

SEQ ID NO: 51151 - protein, 9 aa, Artificial Sequence
  Peptide Derived from Human Papillomavirus
FKKEGQHIE

SEQ ID NO: 51152 - protein, 9 aa, Artificial Sequence
  Peptide Derived from Human Papillomavirus
YKDETQRNS

SEQ ID NO: 51153 - protein, 9 aa, Artificial Sequence
  Peptide Derived from Human Papillomavirus
YNNEEWTLR

SEQ ID NO: 51154 - protein, 9 aa, Artificial Sequence
  Peptide Derived from Human Papillomavirus
LKGEPNRLK

SEQ ID NO: 51155 - protein, 9 aa, Artificial Sequence
  Peptide Derived from Human Papillomavirus
YNGDCGWQK

SEQ ID NO: 51156 - protein, 9 aa, Artificial Sequence
  Peptide Derived from Human Papillomavirus
LFVDVTSTY

SEQ ID NO: 51157 - protein, 9 aa, Artificial Sequence
  Peptide Derived from Human Papillomavirus
YRDDFPYAV

SEQ ID NO: 51158 - protein, 9 aa, Artificial Sequence
  Peptide Derived from Human Papillomavirus
VYRDDFPYA

SEQ ID NO: 51159 - protein, 9 aa, Artificial Sequence
  Peptide Derived from Human Papillomavirus
VQLDIQSTK

SEQ ID NO: 51160 - protein, 9 aa, Artificial Sequence
  Peptide Derived from Human Papillomavirus
VVLELTPQT

SEQ ID NO: 51161 - protein, 9 aa, Artificial Sequence
  Peptide Derived from Human Papillomavirus
IPAELYLKG

SEQ ID NO: 51162 - protein, 9 aa, Artificial Sequence
  Peptide Derived from Human Papillomavirus
IFLDVGAVN

SEQ ID NO: 51163 - protein, 9 aa, Artificial Sequence
  Peptide Derived from Human Papillomavirus
ITSEAQLFN

SEQ ID NO: 51164 - protein, 9 aa, Artificial Sequence
  Peptide Derived from Human Papillomavirus
VPLDIVQST

SEQ ID NO: 51165 - protein, 9 aa, Artificial Sequence
  Peptide Derived from Human Papillomavirus
LSAEVMAYL

SEQ ID NO: 51166 - protein, 9 aa, Artificial Sequence
  Peptide Derived from Human Papillomavirus
IYRDPPLHY

SEQ ID NO: 51167 - protein, 9 aa, Artificial Sequence
  Peptide Derived from Human Papillomavirus
LLEDWNIGL

SEQ ID NO: 51168 - protein, 9 aa, Artificial Sequence
  Peptide Derived from Human Papillomavirus
FSTDLDQFP

SEQ ID NO: 51169 - protein, 9 aa, Artificial Sequence
  Peptide Derived from Human Papillomavirus
VATDSYVKR

SEQ ID NO: 51170 - protein, 9 aa, Artificial Sequence
  Peptide Derived from Human Papillomavirus
YNPDQERLV

SEQ ID NO: 51171 - protein, 9 aa, Artificial Sequence
  Peptide Derived from Human Papillomavirus
VGLEVGRGQ

SEQ ID NO: 51172 - protein, 9 aa, Artificial Sequence
  Peptide Derived from Human Papillomavirus
LRREQLFAR

SEQ ID NO: 51173 - protein, 9 aa, Artificial Sequence
  Peptide Derived from Human Papillomavirus
MSADAYGDS

SEQ ID NO: 51174 - protein, 9 aa, Artificial Sequence
  Peptide Derived from Human Papillomavirus
VTKDNTKTN

SEQ ID NO: 51175 - protein, 9 aa, Artificial Sequence
  Peptide Derived from Human Papillomavirus
VSADNPLFE

SEQ ID NO: 51176 - protein, 9 aa, Artificial Sequence
  Peptide Derived from Human Papillomavirus
FFADGDVAA

SEQ ID NO: 51177 - protein, 9 aa, Artificial Sequence
  Peptide Derived from Human Papillomavirus
LVEESSVIE

SEQ ID NO: 51178 - protein, 9 aa, Artificial Sequence
  Peptide Derived from Human Papillomavirus
VAPDPDFMN

SEQ ID NO: 51179 - protein, 9 aa, Artificial Sequence
  Peptide Derived from Human Papillomavirus
VTHDVYIQG

SEQ ID NO: 51180 - protein, 9 aa, Artificial Sequence
  Peptide Derived from Human Papillomavirus
IVVESVGPT

SEQ ID NO: 51181 - protein, 9 aa, Artificial Sequence
  Peptide Derived from Human Papillomavirus
YYYDISPIA

SEQ ID NO: 51182 - protein, 9 aa, Artificial Sequence
  Peptide Derived from Human Papillomavirus
LFIDPPVIE

SEQ ID NO: 51183 - protein, 9 aa, Artificial Sequence
  Peptide Derived from Human Papillomavirus
IDDEAPGLS

SEQ ID NO: 51184 - protein, 15 aa, Artificial Sequence
  Peptide Derived from Human Papillomavirus
AICIEKQSRAAKRRL

SEQ ID NO: 51185 - protein, 15 aa, Artificial Sequence
  Peptide Derived from Human Papillomavirus
GNLVSMDVKHRPLVQ

SEQ ID NO: 51186 - protein, 15 aa, Artificial Sequence
  Peptide Derived from Human Papillomavirus
LYGAANTGKSLFGMS

SEQ ID NO: 51187 - protein, 15 aa, Artificial Sequence
  Peptide Derived from Human Papillomavirus
NINAGTDSRWPYLHN

SEQ ID NO: 51188 - protein, 15 aa, Artificial Sequence
  Peptide Derived from Human Papillomavirus
NPVYELNDKNWKSFF

SEQ ID NO: 51189 - protein, 15 aa, Artificial Sequence
  Peptide Derived from Human Papillomavirus
QQMLQVEGRHETETP

SEQ ID NO: 51190 - protein, 15 aa, Artificial Sequence
  Peptide Derived from Human Papillomavirus
TPSIADSIKTLLQQY

SEQ ID NO: 51191 - protein, 15 aa, Artificial Sequence
  Peptide Derived from Human Papillomavirus
WNYIDDNLRNALDGN

SEQ ID NO: 51192 - protein, 15 aa, Artificial Sequence
  Peptide Derived from Human Papillomavirus
YVEAVVEKKTGDAIS

SEQ ID NO: 51193 - protein, 15 aa, Artificial Sequence
  Peptide Derived from Human Papillomavirus
DGDICNTMHYTNWTH

SEQ ID NO: 51194 - protein, 15 aa, Artificial Sequence
  Peptide Derived from Human Papillomavirus
ILTAFNSSHKGRINC

SEQ ID NO: 51195 - protein, 15 aa, Artificial Sequence
  Peptide Derived from Human Papillomavirus
IRTYFVQFKDDAEKY

SEQ ID NO: 51196 - protein, 15 aa, Artificial Sequence
  Peptide Derived from Human Papillomavirus
LTAFNSSHKGRINCN

SEQ ID NO: 51197 - protein, 15 aa, Artificial Sequence
  Peptide Derived from Human Papillomavirus
RDQFLSQVKIPKTIT

SEQ ID NO: 51198 - protein, 15 aa, Artificial Sequence
  Peptide Derived from Human Papillomavirus
YTAVSSTWHWTGHNV

SEQ ID NO: 51199 - protein, 15 aa, Artificial Sequence
  Peptide Derived from Human Papillomavirus
CTELQTTIHDIILEC

SEQ ID NO: 51200 - protein, 15 aa, Artificial Sequence
  Peptide Derived from Human Papillomavirus
QKPLCPEEKQRHLDK

SEQ ID NO: 51201 - protein, 15 aa, Artificial Sequence
  Peptide Derived from Human Papillomavirus
AANAGVDNRECISMD

SEQ ID NO: 51202 - protein, 15 aa, Artificial Sequence
  Peptide Derived from Human Papillomavirus
FVTVVDTTRSTNMSL

SEQ ID NO: 51203 - protein, 15 aa, Artificial Sequence
  Peptide Derived from Human Papillomavirus
GGTLEDTYRFVTSQA

SEQ ID NO: 51204 - protein, 15 aa, Artificial Sequence
  Peptide Derived from Human Papillomavirus
PLGVGISGHPLLNKL

SEQ ID NO: 51205 - protein, 15 aa, Artificial Sequence
  Peptide Derived from Human Papillomavirus
RECISMDYKQTQLCL

SEQ ID NO: 51206 - protein, 15 aa, Artificial Sequence
  Peptide Derived from Human Papillomavirus
SQAIACQKHTPPAPK

SEQ ID NO: 51207 - protein, 15 aa, Artificial Sequence
  Peptide Derived from Human Papillomavirus
ATQLYKTCKQAGTCP

SEQ ID NO: 51208 - protein, 15 aa, Artificial Sequence
  Peptide Derived from Human Papillomavirus
HRPALTSRRTGIRYS

SEQ ID NO: 51209 - protein, 15 aa, Artificial Sequence
  Peptide Derived from Human Papillomavirus
KRSAKRTKRASATQL

SEQ ID NO: 51210 - protein, 15 aa, Artificial Sequence
  Peptide Derived from Human Papillomavirus
PSTYTTTSHAALPTS

SEQ ID NO: 51211 - protein, 15 aa, Artificial Sequence
  Peptide Derived from Human Papillomavirus
FTDLVRNFKSDKTTC

SEQ ID NO: 51212 - protein, 15 aa, Artificial Sequence
  Peptide Derived from Human Papillomavirus
GNPISIDRKHKPLIQ

SEQ ID NO: 51213 - protein, 15 aa, Artificial Sequence
  Peptide Derived from Human Papillomavirus
ISFVNSTSHFWLEPL

SEQ ID NO: 51214 - protein, 15 aa, Artificial Sequence
  Peptide Derived from Human Papillomavirus
KDLLKVNNKQGAMLA

SEQ ID NO: 51215 - protein, 15 aa, Artificial Sequence
  Peptide Derived from Human Papillomavirus
KSFLKGTPKKNCLVF

SEQ ID NO: 51216 - protein, 15 aa, Artificial Sequence
  Peptide Derived from Human Papillomavirus
NPVYEINDKNWKCFF

SEQ ID NO: 51217 - protein, 15 aa, Artificial Sequence
  Peptide Derived from Human Papillomavirus
PILLTTNIHPAKDNR

SEQ ID NO: 51218 - protein, 15 aa, Artificial Sequence
  Peptide Derived from Human Papillomavirus
YVQAIVDKKTGDVIS

SEQ ID NO: 51219 - protein, 15 aa, Artificial Sequence
  Peptide Derived from Human Papillomavirus
IDHYENDSKDIDSQI

SEQ ID NO: 51220 - protein, 15 aa, Artificial Sequence
  Peptide Derived from Human Papillomavirus
TGILTVTYHSETQRT

SEQ ID NO: 51221 - protein, 15 aa, Artificial Sequence
  Peptide Derived from Human Papillomavirus
YNTFYIEFKSECEKY

SEQ ID NO: 51222 - protein, 15 aa, Artificial Sequence
  Peptide Derived from Human Papillomavirus
YRDISSTWHWTGAGN

SEQ ID NO: 51223 - protein, 15 aa, Artificial Sequence
  Peptide Derived from Human Papillomavirus
AGHYRGQCHSCCNRA

SEQ ID NO: 51224 - protein, 15 aa, Artificial Sequence
  Peptide Derived from Human Papillomavirus
ARRAEPQRHTMLCMC

SEQ ID NO: 51225 - protein, 15 aa, Artificial Sequence
  Peptide Derived from Human Papillomavirus
APSATTSSKPAKRVR

SEQ ID NO: 51226 - protein, 15 aa, Artificial Sequence
  Peptide Derived from Human Papillomavirus
KDAAPAENKDPYDKL

SEQ ID NO: 51227 - protein, 15 aa, Artificial Sequence
  Peptide Derived from Human Papillomavirus
PLGVGLSGHPFYNKL

SEQ ID NO: 51228 - protein, 15 aa, Artificial Sequence
  Peptide Derived from Human Papillomavirus
RDNVSVDYKQTQLCI

SEQ ID NO: 51229 - protein, 15 aa, Artificial Sequence
  Peptide Derived from Human Papillomavirus
TSNVSEDVRDNVSVD

SEQ ID NO: 51230 - protein, 15 aa, Artificial Sequence
  Peptide Derived from Human Papillomavirus
TTSLVDTYRFVQSVA

SEQ ID NO: 51231 - protein, 15 aa, Artificial Sequence
  Peptide Derived from Human Papillomavirus
DTTLTFDPRSDVPDS

SEQ ID NO: 51232 - protein, 15 aa, Artificial Sequence
  Peptide Derived from Human Papillomavirus
HRPALTSRRGTVRFS

SEQ ID NO: 51233 - protein, 15 aa, Artificial Sequence
  Peptide Derived from Human Papillomavirus
VTDLYKTCKQSGTCP

SEQ ID NO: 51234 - protein, 15 aa, Artificial Sequence
  Peptide Derived from Human Papillomavirus
AICIENNSKTAKRRL

SEQ ID NO: 51235 - protein, 15 aa, Artificial Sequence
  Peptide Derived from Human Papillomavirus
CVDYNISPRLKAICI

SEQ ID NO: 51236 - protein, 15 aa, Artificial Sequence
  Peptide Derived from Human Papillomavirus
GNPVSIDVKHKALMQ

SEQ ID NO: 51237 - protein, 15 aa, Artificial Sequence
  Peptide Derived from Human Papillomavirus
IHGAPNTGKSYFGMS

SEQ ID NO: 51238 - protein, 15 aa, Artificial Sequence
  Peptide Derived from Human Papillomavirus
KHKALMQLKCPPLLI

SEQ ID NO: 51239 - protein, 15 aa, Artificial Sequence
  Peptide Derived from Human Papillomavirus
NINAGKDDRWPYLHS

SEQ ID NO: 51240 - protein, 15 aa, Artificial Sequence
  Peptide Derived from Human Papillomavirus
NPVYELSDKNWKSFF

SEQ ID NO: 51241 - protein, 15 aa, Artificial Sequence
  Peptide Derived from Human Papillomavirus
DGDVHNTMHYTNWKF

SEQ ID NO: 51242 - protein, 15 aa, Artificial Sequence
  Peptide Derived from Human Papillomavirus
EVQFDGDVHNTMHYT

SEQ ID NO: 51243 - protein, 15 aa, Artificial Sequence
  Peptide Derived from Human Papillomavirus
FVNFTEEAKKYGTGK

SEQ ID NO: 51244 - protein, 15 aa, Artificial Sequence
  Peptide Derived from Human Papillomavirus
GIYYVHEGHITYFVN

SEQ ID NO: 51245 - protein, 15 aa, Artificial Sequence
  Peptide Derived from Human Papillomavirus
LEHYENDSKRLCDHI

SEQ ID NO: 51246 - protein, 15 aa, Artificial Sequence
  Peptide Derived from Human Papillomavirus
LTYISTSQRDDFLNT

SEQ ID NO: 51247 - protein, 15 aa, Artificial Sequence
  Peptide Derived from Human Papillomavirus
RDDFLNTVKIPNTVS

SEQ ID NO: 51248 - protein, 15 aa, Artificial Sequence
  Peptide Derived from Human Papillomavirus
VRRATTSTKRPRTEP

SEQ ID NO: 51249 - protein, 15 aa, Artificial Sequence
  Peptide Derived from Human Papillomavirus
YEQVSSTWHWTCTDG

SEQ ID NO: 51250 - protein, 15 aa, Artificial Sequence
  Peptide Derived from Human Papillomavirus
QRPLCPEEKQRHLDK

SEQ ID NO: 51251 - protein, 15 aa, Artificial Sequence
  Peptide Derived from Human Papillomavirus
IVTFCCQCKSTLRLC

SEQ ID NO: 51252 - protein, 15 aa, Artificial Sequence
  Peptide Derived from Human Papillomavirus
DFTALQDTKSNVPLD

SEQ ID NO: 51253 - protein, 15 aa, Artificial Sequence
  Peptide Derived from Human Papillomavirus
FVTVVDTTRSTNMSV

SEQ ID NO: 51254 - protein, 15 aa, Artificial Sequence
  Peptide Derived from Human Papillomavirus
PLGVGISGHPLLNKF

SEQ ID NO: 51255 - protein, 15 aa, Artificial Sequence
  Peptide Derived from Human Papillomavirus
RECISMDYKQTQLCL

SEQ ID NO: 51256 - protein, 15 aa, Artificial Sequence
  Peptide Derived from Human Papillomavirus
SGSLEDTYRFVTSQA

SEQ ID NO: 51257 - protein, 15 aa, Artificial Sequence
  Peptide Derived from Human Papillomavirus
ATQLYQTCKAAGTCP

SEQ ID NO: 51258 - protein, 15 aa, Artificial Sequence
  Peptide Derived from Human Papillomavirus
HRPALTSRRNTVRYS

SEQ ID NO: 51259 - protein, 15 aa, Artificial Sequence
  Peptide Derived from Human Papillomavirus
PTPAETSGHLLLSSS

SEQ ID NO: 51260 - protein, 15 aa, Artificial Sequence
  Peptide Derived from Human Papillomavirus
SLYFSNTSHNIAPDP

SEQ ID NO: 51261 - protein, 15 aa, Artificial Sequence
  Peptide Derived from Human Papillomavirus
TGYVPLSTRPSTVSE

SEQ ID NO: 51262 - protein, 15 aa, Artificial Sequence
  Peptide Derived from Human Papillomavirus
YSKATQQVKVIDPTF

SEQ ID NO: 51263 - protein, 15 aa, Artificial Sequence
  Peptide Derived from Human Papillomavirus
EVEAVIERRTGDNIS

SEQ ID NO: 51264 - protein, 15 aa, Artificial Sequence
  Peptide Derived from Human Papillomavirus
GNEISIDVKHRALVQ

SEQ ID NO: 51265 - protein, 13 aa, Artificial Sequence
  Peptide Derived from Human Papillomavirus
KCSAGENTRSLRS

SEQ ID NO: 51266 - protein, 15 aa, Artificial Sequence
  Peptide Derived from Human Papillomavirus
KHRALVQLKCPPLLL

SEQ ID NO: 51267 - protein, 15 aa, Artificial Sequence
  Peptide Derived from Human Papillomavirus
LDLIEEEDKENHGGN

SEQ ID NO: 51268 - protein, 15 aa, Artificial Sequence
  Peptide Derived from Human Papillomavirus
NTNAGTDSRWPYLHS

SEQ ID NO: 51269 - protein, 15 aa, Artificial Sequence
  Peptide Derived from Human Papillomavirus
SPSVAESLKVLIKQH

SEQ ID NO: 51270 - protein, 15 aa, Artificial Sequence
  Peptide Derived from Human Papillomavirus
ECALLYTAKQMGFSH

SEQ ID NO: 51271 - protein, 15 aa, Artificial Sequence
  Peptide Derived from Human Papillomavirus
QQMFLGTVKIPPTVQ

SEQ ID NO: 51272 - protein, 15 aa, Artificial Sequence
  Peptide Derived from Human Papillomavirus
TVQYDNDKKNTMDYT

SEQ ID NO: 51273 - protein, 15 aa, Artificial Sequence
  Peptide Derived from Human Papillomavirus
YSSMSSTWHWTSDNK

SEQ ID NO: 51274 - protein, 15 aa, Artificial Sequence
  Peptide Derived from Human Papillomavirus
LPMMCINFHAQHMTQ

SEQ ID NO: 51275 - protein, 15 aa, Artificial Sequence
  Peptide Derived from Human Papillomavirus
CQALETTIHNIELQC

SEQ ID NO: 51276 - protein, 15 aa, Artificial Sequence
  Peptide Derived from Human Papillomavirus
GNTLEQTVKKPLNEI

SEQ ID NO: 51277 - protein, 15 aa, Artificial Sequence
  Peptide Derived from Human Papillomavirus
KRHVDLNKRFHNISG

SEQ ID NO: 51278 - protein, 15 aa, Artificial Sequence
  Peptide Derived from Human Papillomavirus
QRPLCPQEKKRHVDL

SEQ ID NO: 51279 - protein, 15 aa, Artificial Sequence
  Peptide Derived from Human Papillomavirus
FVTVVDTTRSTNMTL

SEQ ID NO: 51280 - protein, 15 aa, Artificial Sequence
  Peptide Derived from Human Papillomavirus
IYYYAGSSRLLAVGH

SEQ ID NO: 51281 - protein, 15 aa, Artificial Sequence
  Peptide Derived from Human Papillomavirus
KRAAPTSTRTSSAKR

SEQ ID NO: 51282 - protein, 15 aa, Artificial Sequence
  Peptide Derived from Human Papillomavirus
PLGVGISGHPLLNKF

SEQ ID NO: 51283 - protein, 15 aa, Artificial Sequence
  Peptide Derived from Human Papillomavirus
RECLSMDYKQTQLCL

SEQ ID NO: 51284 - protein, 15 aa, Artificial Sequence
  Peptide Derived from Human Papillomavirus
SASLQDTYRFVTSQA

SEQ ID NO: 51285 - protein, 15 aa, Artificial Sequence
  Peptide Derived from Human Papillomavirus
ATQLYQTCKATGTCP

SEQ ID NO: 51286 - protein, 15 aa, Artificial Sequence
  Peptide Derived from Human Papillomavirus
DPAFLTSPHKLITYD

SEQ ID NO: 51287 - protein, 12 aa, Artificial Sequence
  Peptide Derived from Human Papillomavirus
FPYFFTDVRVAA

SEQ ID NO: 51288 - protein, 15 aa, Artificial Sequence
  Peptide Derived from Human Papillomavirus
HRPAITSRRHTVRFS

SEQ ID NO: 51289 - protein, 15 aa, Artificial Sequence
  Peptide Derived from Human Papillomavirus
PAPAEASGHFIFSSP

SEQ ID NO: 51290 - protein, 15 aa, Artificial Sequence
  Peptide Derived from Human Papillomavirus
FTDLVRNFKSDKTTC

SEQ ID NO: 51291 - protein, 15 aa, Artificial Sequence
  Peptide Derived from Human Papillomavirus
GNPISIDRKHKPLLQ

SEQ ID NO: 51292 - protein, 15 aa, Artificial Sequence
  Peptide Derived from Human Papillomavirus
ISFVNSNSHFWLEPL

SEQ ID NO: 51293 - protein, 15 aa, Artificial Sequence
  Peptide Derived from Human Papillomavirus
KEFLKGTPKKNCILL

SEQ ID NO: 51294 - protein, 15 aa, Artificial Sequence
  Peptide Derived from Human Papillomavirus
KELLQASNKKAAMLA

SEQ ID NO: 51295 - protein, 15 aa, Artificial Sequence
  Peptide Derived from Human Papillomavirus
NPVYEINDKNWKCFF

SEQ ID NO: 51296 - protein, 15 aa, Artificial Sequence
  Peptide Derived from Human Papillomavirus
DTTYYVQFKSECEKY

SEQ ID NO: 51297 - protein, 15 aa, Artificial Sequence
  Peptide Derived from Human Papillomavirus
ENAILFTAREHGITK

SEQ ID NO: 51298 - protein, 15 aa, Artificial Sequence
  Peptide Derived from Human Papillomavirus
LDHYENDSKDINSQI

SEQ ID NO: 51299 - protein, 15 aa, Artificial Sequence
  Peptide Derived from Human Papillomavirus
QCGLTEQHHGRVNTH

SEQ ID NO: 51300 - protein, 15 aa, Artificial Sequence
  Peptide Derived from Human Papillomavirus
YSEISSTWHWTGCNK

SEQ ID NO: 51301 - protein, 15 aa, Artificial Sequence
  Peptide Derived from Human Papillomavirus
FHSIAGQYRGQCNTC

SEQ ID NO: 51302 - protein, 15 aa, Artificial Sequence
  Peptide Derived from Human Papillomavirus
ARRAEPQRHKILCVC

SEQ ID NO: 51303 - protein, 15 aa, Artificial Sequence
  Peptide Derived from Human Papillomavirus
FVTVVDTTRSTNLTL

SEQ ID NO: 51304 - protein, 15 aa, Artificial Sequence
  Peptide Derived from Human Papillomavirus
PLGIGLSGHPFYNKL

SEQ ID NO: 51305 - protein, 15 aa, Artificial Sequence
  Peptide Derived from Human Papillomavirus
RDNVSVDYKQTQLCI

SEQ ID NO: 51306 - protein, 15 aa, Artificial Sequence
  Peptide Derived from Human Papillomavirus
TAVITQDVRDNVSVD

SEQ ID NO: 51307 - protein, 15 aa, Artificial Sequence
  Peptide Derived from Human Papillomavirus
TTSLVDTYRFVQSVA

SEQ ID NO: 51308 - protein, 15 aa, Artificial Sequence
  Peptide Derived from Human Papillomavirus
ATDLYRTCKQSGTCP

SEQ ID NO: 51309 - protein, 15 aa, Artificial Sequence
  Peptide Derived from Human Papillomavirus
ATMFTRSGKQIGGRV

SEQ ID NO: 51310 - protein, 15 aa, Artificial Sequence
  Peptide Derived from Human Papillomavirus
HRPALSSRRGTVRFS

SEQ ID NO: 51311 - protein, 15 aa, Artificial Sequence
  Peptide Derived from Human Papillomavirus
YSRANQQVRVSTSQF

SEQ ID NO: 51312 - protein, 15 aa, Artificial Sequence
  Peptide Derived from Human Papillomavirus
FVDVTSTYHWTSTDN

SEQ ID NO: 51313 - protein, 15 aa, Artificial Sequence
  Peptide Derived from Human Papillomavirus
GIYYVHDGHKTYYTD

SEQ ID NO: 51314 - protein, 15 aa, Artificial Sequence
  Peptide Derived from Human Papillomavirus
NQDAAVSHRPGKRPR

SEQ ID NO: 51315 - protein, 15 aa, Artificial Sequence
  Peptide Derived from Human Papillomavirus
PDSVSSTCRYNVSPV

SEQ ID NO: 51316 - protein, 15 aa, Artificial Sequence
  Peptide Derived from Human Papillomavirus
SRSINNNNHPGDKTT

SEQ ID NO: 51317 - protein, 15 aa, Artificial Sequence
  Peptide Derived from Human Papillomavirus
YTDFEQEAKKFGCKN

SEQ ID NO: 51318 - protein, 15 aa, Artificial Sequence
  Peptide Derived from Human Papillomavirus
EKQLHCDRKRRFHLI

SEQ ID NO: 51319 - protein, 15 aa, Artificial Sequence
  Peptide Derived from Human Papillomavirus
QSPLTPEEKQLHCDR

SEQ ID NO: 51320 - protein, 15 aa, Artificial Sequence
  Peptide Derived from Human Papillomavirus
YNFACTELKLVYRDD

SEQ ID NO: 51321 - protein, 15 aa, Artificial Sequence
  Peptide Derived from Human Papillomavirus
DFKVLQESKAEVPLD

SEQ ID NO: 51322 - protein, 15 aa, Artificial Sequence
  Peptide Derived from Human Papillomavirus
FVTVVDTTRSTNMTI

SEQ ID NO: 51323 - protein, 15 aa, Artificial Sequence
  Peptide Derived from Human Papillomavirus
KPAVATSKKRSAPTS

SEQ ID NO: 51324 - protein, 15 aa, Artificial Sequence
  Peptide Derived from Human Papillomavirus
LDIVQSTCKYPDYLK

SEQ ID NO: 51325 - protein, 15 aa, Artificial Sequence
  Peptide Derived from Human Papillomavirus
NNNVIEDSRDNISVD

SEQ ID NO: 51326 - protein, 15 aa, Artificial Sequence
  Peptide Derived from Human Papillomavirus
PLGAGLSGHPLFNRL

SEQ ID NO: 51327 - protein, 15 aa, Artificial Sequence
  Peptide Derived from Human Papillomavirus
RDNISVDGKQTQLCI

SEQ ID NO: 51328 - protein, 15 aa, Artificial Sequence
  Peptide Derived from Human Papillomavirus
SKPAVATSKKRSAPT

SEQ ID NO: 51329 - protein, 15 aa, Artificial Sequence
  Peptide Derived from Human Papillomavirus
ATQLYKTCKLSGTCP

SEQ ID NO: 51330 - protein, 15 aa, Artificial Sequence
  Peptide Derived from Human Papillomavirus
GRKATIQTRRGTQIG

SEQ ID NO: 51331 - protein, 15 aa, Artificial Sequence
  Peptide Derived from Human Papillomavirus
HRPAFTTRRGGVRFS

SEQ ID NO: 51332 - protein, 15 aa, Artificial Sequence
  Peptide Derived from Human Papillomavirus
QSVATPSAHLPIKPS

SEQ ID NO: 51333 - protein, 15 aa, Artificial Sequence
  Peptide Derived from Human Papillomavirus
YRKAFQQVKVTDPAF

SEQ ID NO: 51334 - protein, 9 aa, Artificial Sequence
  Peptide Derived from Human Papillomavirus
IEKQSRAAK

SEQ ID NO: 51335 - protein, 9 aa, Artificial Sequence
  Peptide Derived from Human Papillomavirus
VSMDVKHRP

SEQ ID NO: 51336 - protein, 9 aa, Artificial Sequence
  Peptide Derived from Human Papillomavirus
AANTGKSLF

SEQ ID NO: 51337 - protein, 9 aa, Artificial Sequence
  Peptide Derived from Human Papillomavirus
AGTDSRWPY

SEQ ID NO: 51338 - protein, 9 aa, Artificial Sequence
  Peptide Derived from Human Papillomavirus
YELNDKNWK

SEQ ID NO: 51339 - protein, 9 aa, Artificial Sequence
  Peptide Derived from Human Papillomavirus
LQVEGRHET

SEQ ID NO: 51340 - protein, 9 aa, Artificial Sequence
  Peptide Derived from Human Papillomavirus
IADSIKTLL

SEQ ID NO: 51341 - protein, 9 aa, Artificial Sequence
  Peptide Derived from Human Papillomavirus
IDDNLRNAL

SEQ ID NO: 51342 - protein, 9 aa, Artificial Sequence
  Peptide Derived from Human Papillomavirus
AVVEKKTGD

SEQ ID NO: 51343 - protein, 9 aa, Artificial Sequence
  Peptide Derived from Human Papillomavirus
ICNTMHYTN

SEQ ID NO: 51344 - protein, 9 aa, Artificial Sequence
  Peptide Derived from Human Papillomavirus
AFNSSHKGR

SEQ ID NO: 51345 - protein, 9 aa, Artificial Sequence
  Peptide Derived from Human Papillomavirus
YFVQFKDDA

SEQ ID NO: 51346 - protein, 9 aa, Artificial Sequence
  Peptide Derived from Human Papillomavirus
FNSSHKGRI

SEQ ID NO: 51347 - protein, 9 aa, Artificial Sequence
  Peptide Derived from Human Papillomavirus
FLSQVKIPK

SEQ ID NO: 51348 - protein, 9 aa, Artificial Sequence
  Peptide Derived from Human Papillomavirus
VSSTWHWTG

SEQ ID NO: 51349 - protein, 9 aa, Artificial Sequence
  Peptide Derived from Human Papillomavirus
LQTTIHDII

SEQ ID NO: 51350 - protein, 9 aa, Artificial Sequence
  Peptide Derived from Human Papillomavirus
LCPEEKQRH

SEQ ID NO: 51351 - protein, 9 aa, Artificial Sequence
  Peptide Derived from Human Papillomavirus
AGVDNRECI

SEQ ID NO: 51352 - protein, 9 aa, Artificial Sequence
  Peptide Derived from Human Papillomavirus
VVDTTRSTN

SEQ ID NO: 51353 - protein, 9 aa, Artificial Sequence
  Peptide Derived from Human Papillomavirus
LEDTYRFVT

SEQ ID NO: 51354 - protein, 9 aa, Artificial Sequence
  Peptide Derived from Human Papillomavirus
VGISGHPLL

SEQ ID NO: 51355 - protein, 9 aa, Artificial Sequence
  Peptide Derived from Human Papillomavirus
ISMDYKQTQ

SEQ ID NO: 51356 - protein, 9 aa, Artificial Sequence
  Peptide Derived from Human Papillomavirus
IACQKHTPP

SEQ ID NO: 51357 - protein, 9 aa, Artificial Sequence
  Peptide Derived from Human Papillomavirus
LYKTCKQAG

SEQ ID NO: 51358 - protein, 9 aa, Artificial Sequence
  Peptide Derived from Human Papillomavirus
ALTSRRTGI

SEQ ID NO: 51359 - protein, 9 aa, Artificial Sequence
  Peptide Derived from Human Papillomavirus
AKRTKRASA

SEQ ID NO: 51360 - protein, 9 aa, Artificial Sequence
  Peptide Derived from Human Papillomavirus
YTTTSHAAL

SEQ ID NO: 51361 - protein, 9 aa, Artificial Sequence
  Peptide Derived from Human Papillomavirus
LVRNFKSDK

SEQ ID NO: 51362 - protein, 9 aa, Artificial Sequence
  Peptide Derived from Human Papillomavirus
ISIDRKHKP

SEQ ID NO: 51363 - protein, 9 aa, Artificial Sequence
  Peptide Derived from Human Papillomavirus
VNSTSHFWL

SEQ ID NO: 51364 - protein, 9 aa, Artificial Sequence
  Peptide Derived from Human Papillomavirus
LKVNNKQGA

SEQ ID NO: 51365 - protein, 9 aa, Artificial Sequence
  Peptide Derived from Human Papillomavirus
LKGTPKKNC

SEQ ID NO: 51366 - protein, 9 aa, Artificial Sequence
  Peptide Derived from Human Papillomavirus
YEINDKNWK

SEQ ID NO: 51367 - protein, 9 aa, Artificial Sequence
  Peptide Derived from Human Papillomavirus
LTTNIHPAK

SEQ ID NO: 51368 - protein, 9 aa, Artificial Sequence
  Peptide Derived from Human Papillomavirus
AIVDKKTGD

SEQ ID NO: 51369 - protein, 9 aa, Artificial Sequence
  Peptide Derived from Human Papillomavirus
YENDSKDID

SEQ ID NO: 51370 - protein, 9 aa, Artificial Sequence
  Peptide Derived from Human Papillomavirus
LTVTYHSET

SEQ ID NO: 51371 - protein, 9 aa, Artificial Sequence
  Peptide Derived from Human Papillomavirus
FYIEFKSEC

SEQ ID NO: 51372 - protein, 9 aa, Artificial Sequence
  Peptide Derived from Human Papillomavirus
ISSTWHWTG

SEQ ID NO: 51373 - protein, 9 aa, Artificial Sequence
  Peptide Derived from Human Papillomavirus
YRGQCHSCC

SEQ ID NO: 51374 - protein, 9 aa, Artificial Sequence
  Peptide Derived from Human Papillomavirus
AEPQRHTML

SEQ ID NO: 51375 - protein, 9 aa, Artificial Sequence
  Peptide Derived from Human Papillomavirus
ATTSSKPAK

SEQ ID NO: 51376 - protein, 9 aa, Artificial Sequence
  Peptide Derived from Human Papillomavirus
APAENKDPY

SEQ ID NO: 51377 - protein, 9 aa, Artificial Sequence
  Peptide Derived from Human Papillomavirus
VGLSGHPFY

SEQ ID NO: 51378 - protein, 9 aa, Artificial Sequence
  Peptide Derived from Human Papillomavirus
VSVDYKQTQ

SEQ ID NO: 51379 - protein, 9 aa, Artificial Sequence
  Peptide Derived from Human Papillomavirus
VSEDVRDNV

SEQ ID NO: 51380 - protein, 9 aa, Artificial Sequence
  Peptide Derived from Human Papillomavirus
LVDTYRFVQ

SEQ ID NO: 51381 - protein, 9 aa, Artificial Sequence
  Peptide Derived from Human Papillomavirus
LTFDPRSDV

SEQ ID NO: 51382 - protein, 9 aa, Artificial Sequence
  Peptide Derived from Human Papillomavirus
ALTSRRGTV

SEQ ID NO: 51383 - protein, 9 aa, Artificial Sequence
  Peptide Derived from Human Papillomavirus
LYKTCKQSG

SEQ ID NO: 51384 - protein, 9 aa, Artificial Sequence
  Peptide Derived from Human Papillomavirus
IENNSKTAK

SEQ ID NO: 51385 - protein, 9 aa, Artificial Sequence
  Peptide Derived from Human Papillomavirus
YNISPRLKA

SEQ ID NO: 51386 - protein, 9 aa, Artificial Sequence
  Peptide Derived from Human Papillomavirus
VSIDVKHKA

SEQ ID NO: 51387 - protein, 9 aa, Artificial Sequence
  Peptide Derived from Human Papillomavirus
APNTGKSYF

SEQ ID NO: 51388 - protein, 9 aa, Artificial Sequence
  Peptide Derived from Human Papillomavirus
ALMQLKCPP

SEQ ID NO: 51389 - protein, 9 aa, Artificial Sequence
  Peptide Derived from Human Papillomavirus
AGKDDRWPY

SEQ ID NO: 51390 - protein, 9 aa, Artificial Sequence
  Peptide Derived from Human Papillomavirus
YELSDKNWK

SEQ ID NO: 51391 - protein, 9 aa, Artificial Sequence
  Peptide Derived from Human Papillomavirus
VHNTMHYTN

SEQ ID NO: 51392 - protein, 9 aa, Artificial Sequence
  Peptide Derived from Human Papillomavirus
FDGDVHNTM

SEQ ID NO: 51393 - protein, 9 aa, Artificial Sequence
  Peptide Derived from Human Papillomavirus
FTEEAKKYG

SEQ ID NO: 51394 - protein, 9 aa, Artificial Sequence
  Peptide Derived from Human Papillomavirus
YVHEGHITY

SEQ ID NO: 51395 - protein, 9 aa, Artificial Sequence
  Peptide Derived from Human Papillomavirus
YENDSKRLC

SEQ ID NO: 51396 - protein, 9 aa, Artificial Sequence
  Peptide Derived from Human Papillomavirus
ISTSQRDDF

SEQ ID NO: 51397 - protein, 9 aa, Artificial Sequence
  Peptide Derived from Human Papillomavirus
FLNTVKIPN

SEQ ID NO: 51398 - protein, 9 aa, Artificial Sequence
  Peptide Derived from Human Papillomavirus
ATTSTKRPR

SEQ ID NO: 51399 - protein, 9 aa, Artificial Sequence
  Peptide Derived from Human Papillomavirus
VSSTWHWTC

SEQ ID NO: 51400 - protein, 9 aa, Artificial Sequence
  Peptide Derived from Human Papillomavirus
LCPEEKQRH

SEQ ID NO: 51401 - protein, 9 aa, Artificial Sequence
  Peptide Derived from Human Papillomavirus
FCCQCKSTL

SEQ ID NO: 51402 - protein, 9 aa, Artificial Sequence
  Peptide Derived from Human Papillomavirus
ALQDTKSNV

SEQ ID NO: 51403 - protein, 9 aa, Artificial Sequence
  Peptide Derived from Human Papillomavirus
VVDTTRSTN

SEQ ID NO: 51404 - protein, 9 aa, Artificial Sequence
  Peptide Derived from Human Papillomavirus
VGISGHPLL

SEQ ID NO: 51405 - protein, 9 aa, Artificial Sequence
  Peptide Derived from Human Papillomavirus
ISMDYKQTQ

SEQ ID NO: 51406 - protein, 9 aa, Artificial Sequence
  Peptide Derived from Human Papillomavirus
LEDTYRFVT

SEQ ID NO: 51407 - protein, 9 aa, Artificial Sequence
  Peptide Derived from Human Papillomavirus
LYQTCKAAG

SEQ ID NO: 51408 - protein, 9 aa, Artificial Sequence
  Peptide Derived from Human Papillomavirus
ALTSRRNTV

SEQ ID NO: 51409 - protein, 9 aa, Artificial Sequence
  Peptide Derived from Human Papillomavirus
AETSGHLLL

SEQ ID NO: 51410 - protein, 9 aa, Artificial Sequence
  Peptide Derived from Human Papillomavirus
FSNTSHNIA

SEQ ID NO: 51411 - protein, 9 aa, Artificial Sequence
  Peptide Derived from Human Papillomavirus
VPLSTRPST

SEQ ID NO: 51412 - protein, 9 aa, Artificial Sequence
  Peptide Derived from Human Papillomavirus
ATQQVKVID

SEQ ID NO: 51413 - protein, 9 aa, Artificial Sequence
  Peptide Derived from Human Papillomavirus
AVIERRTGD

SEQ ID NO: 51414 - protein, 9 aa, Artificial Sequence
  Peptide Derived from Human Papillomavirus
ISIDVKHRA

SEQ ID NO: 51415 - protein, 9 aa, Artificial Sequence
  Peptide Derived from Human Papillomavirus
AGENTRSLR

SEQ ID NO: 51416 - protein, 9 aa, Artificial Sequence
  Peptide Derived from Human Papillomavirus
ALVQLKCPP

SEQ ID NO: 51417 - protein, 9 aa, Artificial Sequence
  Peptide Derived from Human Papillomavirus
IEEEDKENH

SEQ ID NO: 51418 - protein, 9 aa, Artificial Sequence
  Peptide Derived from Human Papillomavirus
AGTDSRWPY

SEQ ID NO: 51419 - protein, 9 aa, Artificial Sequence
  Peptide Derived from Human Papillomavirus
VAESLKVLI

SEQ ID NO: 51420 - protein, 9 aa, Artificial Sequence
  Peptide Derived from Human Papillomavirus
LLYTAKQMG

SEQ ID NO: 51421 - protein, 9 aa, Artificial Sequence
  Peptide Derived from Human Papillomavirus
FLGTVKIPP

SEQ ID NO: 51422 - protein, 9 aa, Artificial Sequence
  Peptide Derived from Human Papillomavirus
YDNDKKNTM

SEQ ID NO: 51423 - protein, 9 aa, Artificial Sequence
  Peptide Derived from Human Papillomavirus
MSSTWHWTS

SEQ ID NO: 51424 - protein, 9 aa, Artificial Sequence
  Peptide Derived from Human Papillomavirus
MCINFHAQH

SEQ ID NO: 51425 - protein, 9 aa, Artificial Sequence
  Peptide Derived from Human Papillomavirus
LETTIHNIE

SEQ ID NO: 51426 - protein, 9 aa, Artificial Sequence
  Peptide Derived from Human Papillomavirus
LEQTVKKPL

SEQ ID NO: 51427 - protein, 9 aa, Artificial Sequence
  Peptide Derived from Human Papillomavirus
VDLNKRFHN

SEQ ID NO: 51428 - protein, 9 aa, Artificial Sequence
  Peptide Derived from Human Papillomavirus
LCPQEKKRH

SEQ ID NO: 51429 - protein, 9 aa, Artificial Sequence
  Peptide Derived from Human Papillomavirus
VVDTTRSTN

SEQ ID NO: 51430 - protein, 9 aa, Artificial Sequence
  Peptide Derived from Human Papillomavirus
YAGSSRLLA

SEQ ID NO: 51431 - protein, 9 aa, Artificial Sequence
  Peptide Derived from Human Papillomavirus
APTSTRTSS

SEQ ID NO: 51432 - protein, 9 aa, Artificial Sequence
  Peptide Derived from Human Papillomavirus
VGISGHPLL

SEQ ID NO: 51433 - protein, 9 aa, Artificial Sequence
  Peptide Derived from Human Papillomavirus
LSMDYKQTQ

SEQ ID NO: 51434 - protein, 9 aa, Artificial Sequence
  Peptide Derived from Human Papillomavirus
LQDTYRFVT

SEQ ID NO: 51435 - protein, 9 aa, Artificial Sequence
  Peptide Derived from Human Papillomavirus
LYQTCKATG

SEQ ID NO: 51436 - protein, 9 aa, Artificial Sequence
  Peptide Derived from Human Papillomavirus
FLTSPHKLI

SEQ ID NO: 51437 - protein, 9 aa, Artificial Sequence
  Peptide Derived from Human Papillomavirus
FFTDVRVAA

SEQ ID NO: 51438 - protein, 9 aa, Artificial Sequence
  Peptide Derived from Human Papillomavirus
AITSRRHTV

SEQ ID NO: 51439 - protein, 9 aa, Artificial Sequence
  Peptide Derived from Human Papillomavirus
AEASGHFIF

SEQ ID NO: 51440 - protein, 9 aa, Artificial Sequence
  Peptide Derived from Human Papillomavirus
LVRNFKSDK

SEQ ID NO: 51441 - protein, 9 aa, Artificial Sequence
  Peptide Derived from Human Papillomavirus
ISIDRKHKP

SEQ ID NO: 51442 - protein, 9 aa, Artificial Sequence
  Peptide Derived from Human Papillomavirus
VNSNSHFWL

SEQ ID NO: 51443 - protein, 9 aa, Artificial Sequence
  Peptide Derived from Human Papillomavirus
LKGTPKKNC

SEQ ID NO: 51444 - protein, 9 aa, Artificial Sequence
  Peptide Derived from Human Papillomavirus
LQASNKKAA

SEQ ID NO: 51445 - protein, 9 aa, Artificial Sequence
  Peptide Derived from Human Papillomavirus
YEINDKNWK

SEQ ID NO: 51446 - protein, 9 aa, Artificial Sequence
  Peptide Derived from Human Papillomavirus
YYVQFKSEC

SEQ ID NO: 51447 - protein, 9 aa, Artificial Sequence
  Peptide Derived from Human Papillomavirus
ILFTAREHG

SEQ ID NO: 51448 - protein, 9 aa, Artificial Sequence
  Peptide Derived from Human Papillomavirus
YENDSKDIN

SEQ ID NO: 51449 - protein, 9 aa, Artificial Sequence
  Peptide Derived from Human Papillomavirus
LTEQHHGRV

SEQ ID NO: 51450 - protein, 9 aa, Artificial Sequence
  Peptide Derived from Human Papillomavirus
ISSTWHWTG

SEQ ID NO: 51451 - protein, 9 aa, Artificial Sequence
  Peptide Derived from Human Papillomavirus
IAGQYRGQC

SEQ ID NO: 51452 - protein, 9 aa, Artificial Sequence
  Peptide Derived from Human Papillomavirus
AEPQRHKIL

SEQ ID NO: 51453 - protein, 9 aa, Artificial Sequence
  Peptide Derived from Human Papillomavirus
VVDTTRSTN

SEQ ID NO: 51454 - protein, 9 aa, Artificial Sequence
  Peptide Derived from Human Papillomavirus
IGLSGHPFY

SEQ ID NO: 51455 - protein, 9 aa, Artificial Sequence
  Peptide Derived from Human Papillomavirus
VSVDYKQTQ

SEQ ID NO: 51456 - protein, 9 aa, Artificial Sequence
  Peptide Derived from Human Papillomavirus
ITQDVRDNV

SEQ ID NO: 51457 - protein, 9 aa, Artificial Sequence
  Peptide Derived from Human Papillomavirus
LVDTYRFVQ

SEQ ID NO: 51458 - protein, 9 aa, Artificial Sequence
  Peptide Derived from Human Papillomavirus
LYRTCKQSG

SEQ ID NO: 51459 - protein, 9 aa, Artificial Sequence
  Peptide Derived from Human Papillomavirus
FTRSGKQIG

SEQ ID NO: 51460 - protein, 9 aa, Artificial Sequence
  Peptide Derived from Human Papillomavirus
ALSSRRGTV

SEQ ID NO: 51461 - protein, 9 aa, Artificial Sequence
  Peptide Derived from Human Papillomavirus
ANQQVRVST

SEQ ID NO: 51462 - protein, 9 aa, Artificial Sequence
  Peptide Derived from Human Papillomavirus
VTSTYHWTS

SEQ ID NO: 51463 - protein, 9 aa, Artificial Sequence
  Peptide Derived from Human Papillomavirus
YVHDGHKTY

SEQ ID NO: 51464 - protein, 9 aa, Artificial Sequence
  Peptide Derived from Human Papillomavirus
AAVSHRPGK

SEQ ID NO: 51465 - protein, 9 aa, Artificial Sequence
  Peptide Derived from Human Papillomavirus
VSSTCRYNV

SEQ ID NO: 51466 - protein, 9 aa, Artificial Sequence
  Peptide Derived from Human Papillomavirus
INNNNHPGD

SEQ ID NO: 51467 - protein, 9 aa, Artificial Sequence
  Peptide Derived from Human Papillomavirus
FEQEAKKFG

SEQ ID NO: 51468 - protein, 9 aa, Artificial Sequence
  Peptide Derived from Human Papillomavirus
LHCDRKRRF

SEQ ID NO: 51469 - protein, 9 aa, Artificial Sequence
  Peptide Derived from Human Papillomavirus
LTPEEKQLH

SEQ ID NO: 51470 - protein, 9 aa, Artificial Sequence
  Peptide Derived from Human Papillomavirus
ACTELKLVY

SEQ ID NO: 51471 - protein, 9 aa, Artificial Sequence
  Peptide Derived from Human Papillomavirus
VLQESKAEV

SEQ ID NO: 51472 - protein, 9 aa, Artificial Sequence
  Peptide Derived from Human Papillomavirus
VVDTTRSTN

SEQ ID NO: 51473 - protein, 9 aa, Artificial Sequence
  Peptide Derived from Human Papillomavirus
VATSKKRSA

SEQ ID NO: 51474 - protein, 9 aa, Artificial Sequence
  Peptide Derived from Human Papillomavirus
VQSTCKYPD

SEQ ID NO: 51475 - protein, 9 aa, Artificial Sequence
  Peptide Derived from Human Papillomavirus
VIEDSRDNI

SEQ ID NO: 51476 - protein, 9 aa, Artificial Sequence
  Peptide Derived from Human Papillomavirus
AGLSGHPLF

SEQ ID NO: 51477 - protein, 9 aa, Artificial Sequence
  Peptide Derived from Human Papillomavirus
ISVDGKQTQ

SEQ ID NO: 51478 - protein, 9 aa, Artificial Sequence
  Peptide Derived from Human Papillomavirus
AVATSKKRS

SEQ ID NO: 51479 - protein, 9 aa, Artificial Sequence
  Peptide Derived from Human Papillomavirus
LYKTCKLSG

SEQ ID NO: 51480 - protein, 9 aa, Artificial Sequence
  Peptide Derived from Human Papillomavirus
ATIQTRRGT

SEQ ID NO: 51481 - protein, 9 aa, Artificial Sequence
  Peptide Derived from Human Papillomavirus
AFTTRRGGV

SEQ ID NO: 51482 - protein, 9 aa, Artificial Sequence
  Peptide Derived from Human Papillomavirus
ATPSAHLPI

SEQ ID NO: 51483 - protein, 9 aa, Artificial Sequence
  Peptide Derived from Human Papillomavirus
AFQQVKVTD

SEQ ID NO: 51484 - protein, 14 aa, Clostridium tetani
QYIKANSKFIGITE

SEQ ID NO: 51485 - protein, 21 aa, Plasmodium falciparum
DIEKKIAKMEKASSVFNVVNS

SEQ ID NO: 51486 - protein, 16 aa, Streptococcus mutans
GAVDSILGGVATYGAA

SEQ ID NO: 51487 - protein, 9 aa, Artificial Sequence
  Artificially Synthesized Peptide
YLEPAIAKY

SEQ ID NO: 51488 - protein, 10 aa, Artificial Sequence
  Artificially Synthesized Peptide
FLPSDYFPSV

SEQ ID NO: 51489 - protein, 9 aa, Artificial Sequence
  Artificially Synthesized Peptide
YVIKVSARV

SEQ ID NO: 51490 - protein, 10 aa, Artificial Sequence
  Artificially Synthesized Peptide
KVFPYALINK

SEQ ID NO: 51491 - protein, 9 aa, Artificial Sequence
  Artificially Synthesized Peptide
AVDLYHFLK

SEQ ID NO: 51492 - protein, 11 aa, Artificial Sequence
  Artificially Synthesized Peptide
STLPETYVVRR

SEQ ID NO: 51493 - protein, 9 aa, Artificial Sequence
  Artificially Synthesized Peptide
AYIDNYNKF

SEQ ID NO: 51494 - protein, 9 aa, Artificial Sequence
  Artificially Synthesized Peptide
APRTLVYLL

SEQ ID NO: 51495 - protein, 9 aa, Artificial Sequence
  Artificially Synthesized Peptide
FPFKYAAAF

SEQ ID NO: 51496 - protein, 13 aa, Artificial Sequence
  Artificially Synthesized Peptide
PKYVKQNTLKLAT

SEQ ID NO: 51497 - protein, 12 aa, Artificial Sequence
  Artificially Synthesized Peptide
YKTIAFDEEARR

SEQ ID NO: 51498 - protein, 14 aa, Artificial Sequence
  Artificially Synthesized Peptide
YARFQSQTTLKQKT

SEQ ID NO: 51499 - protein, 14 aa, Artificial Sequence
  Artificially Synthesized Peptide
QYIKANSKFIGITE

SEQ ID NO: 51500 - protein, 15 aa, Artificial Sequence
  Artificially Synthesized Peptide
EALIHQLKINPYVLS

SEQ ID NO: 51501 - protein, 17 aa, Artificial Sequence
  Artificially Synthesized Peptide
GRTQDENPVVHFFKNIV

SEQ ID NO: 51502 - protein, 13 aa, Artificial Sequence
  Artificially Synthesized Peptide
NGQIGNDPNRDIL

SEQ ID NO: 51503 - protein, 9 aa, Artificial Sequence
  DR7 preferred motif
  VARIANT (1)..(1): Xaa = Met, Phe, Leu, Ile, Val, Trp or Tyr
  VARIANT (5)..(5): Xaa = Any amino acid
  VARIANT (6)..(6): Xaa = Ile, Val, Met, Ser, Ala, Cys, Thr, Pro or Leu
  VARIANT (8)..(8): Xaa = Any amino acid
  VARIANT (9)..(9): Xaa = Ile or Val
XMWAXXMXX

SEQ ID NO: 51504 - protein, 9 aa, Artificial Sequence
  DR7 deleterious motif
  VARIANT (1)..(1): Xaa = Any amino Acid
  VARIANT (3)..(3): Xaa = Any amino Acid
  VARIANT (5)..(5): Xaa = Any amino Acid
  VARIANT (6)..(6): Xaa = Any amino Acid
  VARIANT (7)..(7): Xaa = Gly, Arg or Asp
XCXGXXXNG
